United States Patent Application Publication US 2025/0223339 A1 - sequence listing, part 2

SEQ ID NO: 7056 - DNA, 375 bp, synthetic construct
  source 1..375: mol_type = other DNA
gaggtgcagctgttggagtctgggggaggcgtggtccagcctgggaggtccctgagactctcctgtgcagcctcgggattcaccttcagtaactatgctatgcactgggtccgccaggctccaggcaaggggctggagtgggtgacacttatatcatatgatgggaccaataaatattacgcagactccgtgaagggccgattcagtatctccagagacaattccaagaacacgctgtatctgcaaatgaacagcctgagagctgacgacacggctgtctattactgtgcgaggccgtcggggagggtgctacacgacccctgggcctacggtatggacgtctggggccaagggaccacggtcaccgtctcctca

SEQ ID NO: 7057 - DNA, 381 bp, synthetic construct
  source 1..381: mol_type = other DNA
gaggtgcagctgttggagtcgggcccaggactggtgaagccttcacagaccctgtccctcacctgcactgtctctggtggctccatcagcagtggtgcttactactggagctggatccgccagcacccagggaagggcctggagtggattgggtacatctcttacagtgggaatatcgactacaacccgtccctcaagagtcgagttatcatatcagtagacacgtctaagaaccagttctccctgaagctgagctctgtgactgccgcggacacggccgtgtattactgtgcgagaacgtattactttgatagtagtggtaattattaccagtactactttgactactggggccagggaaccctggtcaccgtctcctca

SEQ ID NO: 7058 - DNA, 387 bp, synthetic construct
  source 1..387: mol_type = other DNA
gaggtgcagctgttggagtctgggtctgaggtgaagaagcctgggtcctcggtgaaggtctcatgccaggcctctggaggcaccttcagtaactctgctatcaactgggtgcgccaggcccctggacaaggccttgagtggatgggagggatcatccctctctttgggacagcaaactacgcacagaagttccaggacagagtcacgattaccgcggacaaatccacgaggacagcctacatggagttgagcagcctgagatctgaggacacggccgtctattactgtgcgagaggctccctttatcacgataccagatgggggagttttgacaaccactactacatggacgtctggggcaaagggaccacggtcaccgtctcctca

SEQ ID NO: 7059 - DNA, 348 bp, synthetic construct
  source 1..348: mol_type = other DNA
gaggtgcagctgttggagtctggaggaggcttggtccagcctggggggtccctgagactctcctgtgcagcctctgggttcagcgtcagaaccaactacatgagctgggtccgccaggctccagggaaggggctggagtgggtctcagttatctatagcgatgataacacaaactacgcagactccgtgaagggccgattcaccatctccagacacaattccaagaacacgctgtatcttcaaatgaacagcctgagagctgaggacacggccgtgtattactgtgcgagagtggttaccgaggcttttgatatctggggccaagggacaacggtcaccgtctcctca

SEQ ID NO: 7060 - DNA, 360 bp, synthetic construct
  source 1..360: mol_type = other DNA
gaggtgcagctggtgcagtctgggggaggcttggtccagcctggggggtccctgagactctcctgtgcagcctctagattcacctttagtagctattggatgagctgggtccgccaggctccagggaaggggctggagtgggcggccaccataaagcaagatggaagtgagaaattgtatgtggagtctgtgaagggccgattcaccatctccagagacaacgccaagaactcactgtatctgcaaatgaacagcctgggagccgaggacacggctgtttattactgtgcgagagtgggcccttactactactacggtatggacgtctggggccaagggaccacggtcaccgtctcctca

SEQ ID NO: 7061 - DNA, 378 bp, synthetic construct
  source 1..378: mol_type = other DNA
gaggtgcagctgttggagtccgggggaggcttggtacagcctggcaggtccctgagactctcctgtgcagcctctggattcacgtttgacgatcatgccatgcactgggtccggcaagctccagggaagggcctggagtgggtctcaggtattagttggaatagtaataacataggctatggggactctgtgaagggccgattcaccatctccagagacaacgccaagaactccctgtttctgcaaatgaacagtctgagagctgacgacacggccttgtattactgtgcaaagtcccacgatattttggatggttatctcgaccaaataaactactttgactactggggccagggaaccctggtcaccgtctcctca

SEQ ID NO: 7062 - DNA, 360 bp, synthetic construct
  source 1..360: mol_type = other DNA
caggtgcagctggtgcagtctgggggaggcgtggtccagcctgggaggtccctgagactctcctgtgcagcgtctggattcaccttcagtagctacgccatacactgggtccgccaggctccaggcaaggggctggagtgggtggcagttatctggtctgatggaagtcatcaacactatgcagactccgtgaaggggagattcaccatctccagagacaattccaagaacacactgtatctgcaaatgaacagcctgagagccgaggacacggctgtgtattactgtgcgagagatgacggatcacctaccacttactttggcgactggggccagggaaccctggtcaccgtctcctca

SEQ ID NO: 7063 - DNA, 372 bp, synthetic construct
  source 1..372: mol_type = other DNA
caggtccagctggagcagtctggggctgaggtgaagaagcctgggtcttcggtgaaggtctcctgcaaggcttctggaggcaccttcagcagctatactatcagctgggtgcgacaggcccctggacaagggcttgagtggatgggaaggatcatccctgcccttggtatagcagactacgcacagaacttccaggacagagtcacgattaccgcggacaaatccacgagcacagcctacatggagctgagcagcctgagatctgaggacacggccgtatatttctgtgcgagagatgtgggttactctgggtcggggagttcttactactttgactactggggccagggaaccctggtcaccgtctcctca

SEQ ID NO: 7064 - DNA, 372 bp, synthetic construct
  source 1..372: mol_type = other DNA
caggtgcagctggagcagtctggggctgaggtgaagaagcctgggtcctcggtgaaggtctcctgcaaggcttctgggggcaccttcagcagccatagtattacctgggtgcgacaggcccctggacaagggcttgagtggatgggaaggatcatccctatccttgatatagcaaactacgcacagaaattccagggcagagtaacgattaccgcggacaaatccacgagcacagcctacatggaactgagcagcctgagatatgaggatacggccgtgttttattgtgcgagagaaatcggatatagtgactacggggcaacggagtggttcgacccctggggccagggaaccctggtcaccgtctcctca

SEQ ID NO: 7065 - DNA, 366 bp, synthetic construct
  source 1..366: mol_type = other DNA
caggtccagctggtgcagtctggagcagaggtgaaaaagcccggggagtctctgaagatctcctgtaagggttctggatacagctttaccagctactggatcgcctgggtgcgccagatgcccgggaaaggcctggagtggatggggctcatctatcctggtgactctgataccagatacagcccgtccttccaaggccaggtcaccatgtcagccgacaagtccatcagcaccgcctacctgcagtggaacagcctgaaggcctcggacaccgccgtatattactgtgcgagttcagcatcagcttattacctcttcttctacatggacgtctggggcaaagggaccacggtcaccgtctcctca

SEQ ID NO: 7066 - DNA, 360 bp, synthetic construct
  source 1..360: mol_type = other DNA
gaggtgcagctgttggagtcgggcccaggactggtgaagccttcacagaccctgtccctcacctgcactgtctctggtggctccatcagcagtggtggttactactggggctggatccgccagcacccagggaagggcctggagtggattgggcacatctattacagtgggggcaccaactacaacccgtccctcaagagtcgagttaccatatcagaagacacgtctaagaaccagttctccctgaagctgagctctgtgactgccgcggacacggccgtatattactgtgcgagagatcgggacggtgacttctcctttgacttctggggccagggaaccctggtcaccgtctcctca

SEQ ID NO: 7067 - DNA, 357 bp, synthetic construct
  source 1..357: mol_type = other DNA
gaggtgcagctgttggagtctgggggaggcttggtccagcctggggggtccctgagactctcttgtgcagcctctggattcacctttagtagttattggatgagctgggtccgccaggctccagggaaggggctggagtgggcggccagcataaagctagatggaagtgagaaatactatgtggtctctgcgaagggccgatacaccatctccagagacaacgccaagaactcactgtatctgcaaatgaacagcctgagagccgaggacacggccgtgtattactgtgcgagaaagagatggctacaatcagactttgactactggggccagggaaccctggtcaccgtctcctca

SEQ ID NO: 7068 - DNA, 378 bp, synthetic construct
  source 1..378: mol_type = other DNA
gaggtgcagctgttggagtctgggggaggcttggtacagcctggcaggtccctgagactctcctgtgcagcctctggattcacgtttgacgatcatgccatgcactgggtccggcaagctccagggaagggcctggagtgggtctcaggtattagttggaatagtggtaacataggctatggggactctgtgaagggccgattcaccatctccagagacaacgccaagaactccctgtttctgcaaatgaacagtctgagagctgacgacacggccttgtattactgtgcaaagtcccacgatattttgaatggttatctcgaccaaataaactactttgactactggggccagggaaccctggtcaccgtctcctca

SEQ ID NO: 7069 - DNA, 372 bp, synthetic construct
  source 1..372: mol_type = other DNA
gaggtgcagctggtggagtctgggggaggcttggtacagcctggcaggtccctgagactctcatgtgcagcctctggattcatctttgatgattatgccatgcactgggtccggcaagctccagggaagggcctggagtgggtctcaggtattagttggaatagtgctagtttaggctatgcggactctgtcaagggccgattcaccatctccagagacaacgtcaagaactccttatctctgcaaatgaacagtctgagagctgaggacacggccttgtattactgtgcaaaagataaatcgtcaaactacggtgactacgctgggggtctgggcgtctggggccaagggaccacggtcaccgtctcctca

SEQ ID NO: 7070 - DNA, 354 bp, synthetic construct
  source 1..354: mol_type = other DNA
gaggtgcagctggtggagtccgggggaggcttagttcagcctggggggtccctgagactctcctgtgcagcctctggattcaccttcagtagctactggatgcactgggtccgccaagctccagggaaggggctggtgtgggtctcacgtattaagagtgatgggagtagcacaacctacgcggactccgtgaagggccgattcaccttctccagagacaacgccaagaacacgctttatctgcaaatggacagtctgagagccgaggacacggctgtatattactgtgcaagtgccccctcctactactacatggacgtctggggcaaggggaccacggtcaccgtctcctca

SEQ ID NO: 7071 - DNA, 381 bp, synthetic construct
  source 1..381: mol_type = other DNA
gaggtgcagctgttggagtctgggggaggcgtggtccagcctgggaggtccctgagactctcctgtgcagcgtctggattcaccttcagtgactatggcatgcactgggtccgccaggctccaggcaaggggctggagtgggtggcagttatatggtatcatggaagtgataaatactatgcagactccgtgaagggccgattcaccatctccagagacaattcgaagaacacgctgtatctccaaatgaacagcctgagagccgaggacacggctgtgtattactgtgcgagagatgggggctttaaaccgatatatcctcgctactactactactacatggacgtctggggcaaagggaccacggtcaccgtctcctca

SEQ ID NO: 7072 - DNA, 381 bp, synthetic construct
  source 1..381: mol_type = other DNA
gaggtgcagctggtgcagtctgggggaggcttggtacagcctggcaggtccctgagactctcctgtgcagcctctggattcacctttgatgattatgccatgcactgggtccggcaagctccagggaagggcctggagtgggtctcaggtattagtgggaatagtggtaccataggctatgcggactctgtgaagggccgattcaccatctccagagacaacgccaagaactccctctatctgcaaatgaacagactgagagctgaggacacggccttgtatttctgtgcaaaaactatggccccagacagggcccattacgataccgcgaacgatgcatttgatatctggggccaggggaccacggtcaccgtctcctca

SEQ ID NO: 7073 - DNA, 387 bp, synthetic construct
  source 1..387: mol_type = other DNA
cagatcaccccgaaggagtctggtcttacgctggtgaaacccacacagaccctcacgctgacctgcaccttctctgggttctcactcagcactagtggagtgggtgtgggctggatccgtcagcccccaggaaaggccctggagtggcttgcactcatttattggaatgatgataagcgttacagcccatctctgaagaacaggctcaccatcaccaaggacacctccaaaaaccaggtggtctttacaatgaccaacatggaccctgtggacacagccacatattactgtgcacacagacggggggatattgtagtagtaccagctgctattatagacaactggttcgacccctggggccagggaaccctggtcaccgtctcctca

SEQ ID NO: 7074 - DNA, 372 bp, synthetic construct
  source 1..372: mol_type = other DNA
gaggtgcagctggtggagtctgggggaggcttggtacagcctggcaggtccctgagactctcctgtgcagcctctggattcacctttaatgattatgccatgcactgggtccggcaagctccagggaagggcctggagtgggtctcaggtattagttggaatagtggtagcataggctatgcggactctgtgaagggccgattcaccatctccagagacaacgccaagaactccctctatctgcaaatgaacagtctgagagctgaggacacggccttctattactgtgtaaaagataaatcgtcaaactacggtgactacgctgggggtatggacgtctgggcccaagggaccacggtcaccgtctcctca

SEQ ID NO: 7075 - DNA, 339 bp, synthetic construct
  source 1..339: mol_type = other DNA
gaggtgcagctgttggagtccggagcagaggtgaagaaacccggggagtctctgaggatctcctgtaagggttctggatacagctttttccattactggatcagctgggtgcgccagatgcccgggaaaggcctggaatggatggcgaccattaatcctgttaactcttataccaactacaacccgtccttccaaggccaagtcaccatctcagttgacaggtccatcaacactgtctacctgcaatggagcagtctgagggcctcggacagcgccatgtattactgtgcgaccgcggataggggttggggccagggaaccctggtcaccgtctcctca

SEQ ID NO: 7076 - DNA, 369 bp, synthetic construct
  source 1..369: mol_type = other DNA
caggtccagcttgtgcagtctgggcctgaggtgaagatgcctgggacctcagtgacggtctcctgtaaggcttctggattcacctttgctgtctcttctgtgcagtgggtgcgacaggctcgtggacaacgcctggagtggataggctggatggtcgttggcagtggcgacaccaactacgcagagaagttccaggaaagagtcaccatttccggggacatgtccacaggcacagtctacatggaagtgagcggcctgaagtccgacgacacggccgtgtattactgtgcggcaccctcctgcagtagaaccacctgttacgatggttttaatctctggggccaagggaccacggtcaccgtctcctca

SEQ ID NO: 7077 - DNA, 381 bp, synthetic construct
  source 1..381: mol_type = other DNA
gaggtgcagctgttggagtctgggggaggcttggtccagcctggggggtccatgagaatatcctgtgcagcctcaggattcaccttcagtagatatagcatgcactgggtccgccaggctccaggcaaggggctggagtgggtgtcaggtatatcatattatagaagtgatatagactatgcagactctgtgaacggccgattcaccatctccagagacagttccaagaacacgctgtatctgcaaatgaacagcctgaaagatgaggacacggctgtgtattactgtgcgaaagttgccgggacgtattgtagtggtactacctgctcctcggggtactttgactactggggccagggaaccgcggtcaccgtatcatca

SEQ ID NO: 7078 - DNA, 369 bp, synthetic construct
  source 1..369: mol_type = other DNA
gaggtgcagctgttggagtctgggggagccgtggtacagcctggggggtcactgagactctcctgtgcagcctctggattcgcctttcatgattattccatgcactgggtccgtcaggctccagggaagggtctggagtgggtctctcttattggtccggatggtggtggcgcattctattcagactatgtgaagggccgattcaccgtctccagagacaacagcaaaaactccctctttctacaactgaacagtatgagaagtgaggacaccgccttctattactgtgcaaaagatacttccggggccaaatgtagggtaccaatctttgagaactggggccagggaaccctggtcaccgtctcctca

SEQ ID NO: 7079 - DNA, 366 bp, synthetic construct
  source 1..366: mol_type = other DNA
caggtgcagctggtgcagtctgggactgaggtgaagaagcctggggcctcagtgaaggtttcctgcaaggcatcgggatacaccttcagcgaccactatatgcactgggtgcgacaggcccctggacaagggcttgagtggatgggagtaaccaaccctagtgctgggagcacaacctacgcacagaagttccagggcagagtcaccatgaccactgacacgtccacgagcacggtctacctgggactgagcaacctgagacctgaagacacggccgtttatttctgtgcaagagatatttttttcttaccagccggtgatgcttttgatctctggggccaagggaccacggtcaccgtctcctca

SEQ ID NO: 7080 - DNA, 360 bp, synthetic construct
  source 1..360: mol_type = other DNA
gaggtccagctggtgcagtctgaaactgaggtgaagaagcctggggcctcagtgaaggtctcctgcaaggcttctgggtataactttgtcaattatggtataagttgggtgcgacaggcccctggacaagggcttgagtggatgggatggatcaacgctgagtatggcaacagaaagtatgcacagatggtccagggcagagtcaccatgaccacagacacatccacgagcacagcctacatggaactgaggagtatcagatttgacgacacggccgtgtattattgtgtgagagtgagcagcagcgcaaccgggtacttcgatctagggggccgtggcaccctggtcaccgtctcctca

SEQ ID NO: 7081 - DNA, 387 bp, synthetic construct
  source 1..387: mol_type = other DNA
caggtacagctgcagcagtcgggcccaggactggtgaagccttcacagaccctgtccctcacctgcactgtctctggtggctccatcagcagtgtttattactactggacctggatccgccagcacccagggaagggcctagagtggatggggcacatctatcacaatgggaccacctactccaatccgtccctcaagagccgagttaccatgtcactggacacgtctaagaaccagttttccctgaaggtgagctctgtgactgccgcggacacggccgtgtattactgtgcgagacttggaccgtctttctacgatagaagtggttcctcacgtcttaactactttgactcctgggaccaggggaccacggtcaccgtctcctca

SEQ ID NO: 7082 - DNA, 372 bp, synthetic construct
  source 1..372: mol_type = other DNA
gaggtgcagctgttggagtctgggggaggcttgatacagcctggggggtccctgagactctcctgtgtagcctctggatttaccttcagtagctacgacatgcactgggtccgccaaactccgagtaacggtctggagtgggtctcaggtattggtactactggtgacacatactatttggactccgtgaagggccgattcaccatctccagagaaaatgccaagagctccttgtatcttcaaatgaacagcctgagagccggggacacggctgtttattactgtgcaagaggagatcagtgggagctactcaatcgctactactacgctatggacgtctggggccaagggaccacggtcaccgtctcctca

SEQ ID NO: 7083 - DNA, 372 bp, synthetic construct
  source 1..372: mol_type = other DNA
caggtgcagctgcaggagtccgggggaggcttggtacagcctggggggtccctgagactctcctgtgcagcctctggattcacgttgagtagtgtcgacatgcactgggtccggcaagtctctggaaagggtctggaatgggtctcaggtattggttctgctggtgacacatactatgcagactccgtgaagggccgattcaccatctccagagaaaatgccaggaactccttgtatcttcaaatgagcagcctgagagccggggacacggctgtctacttctgtgcaagaggtgaccatattttgactggtctcaattactactactacatggacgtctggggcaaagggaccacggtcaccgtctcctca

SEQ ID NO: 7084 - DNA, 390 bp, synthetic construct
  source 1..390: mol_type = other DNA
caggcgcagctgttggagtcgggcccaggactggtgaagccttcggagaccctgtccctcacatgcactgtctctggcggctccatcagcagtgatcatttctactggggctggatccgccagcccccagggaaggggctggagtggattgggaccacctattatactgggagcaccaactacaacccgtccctcaagagtcgggtcaccatatccgttgacacgtccaagaaccagttctccctgaggctgacctctgtgaccgccacagacacggctgtgtattactgtgcgcgagtcgaggtttcgggtggatttagtggctacgatttcctcacaccgtattactttgactactggggccagggagccctggtcaccgtctcctca

SEQ ID NO: 7085 - DNA, 363 bp, synthetic construct
  source 1..363: mol_type = other DNA
caggtgcagctggtggagtctggggctgaggtgaagaagcctggggcctcagtgagggtttcctgcaaggcatctggatacaccttcaccagtcaatatgtgcactgggtgcgacaggcccctggacaagggcttgagtggatgggaataatcaaccctactggaagtacaggctacgcacagaagttccagggcagagtcaccatgaccagtgacacgtccacgagcacaatctacatggagctgagtggcctgagatctgaggacacggccgtctattattgtgcgagagatcttgtttttataccagctattgatgctttagaaatctggggccaagggaccacggtcaccgtctcctca

SEQ ID NO: 7086 - DNA, 354 bp, synthetic construct
  source 1..354: mol_type = other DNA
gaggtgcagctgttggagtcgggcccaggactggtgaagccttcggagaccctgtccctcacctgcagtgtctctggtgactccattagtggttactactggagctggatccggcagcccccagggaagggactggagtggattgggtatatctataacagtgagaccaccgactacaacccctccctcaagagtcgagtcaccatgtctggagacacgtccaagaaccaggtctccctgaggctgacctctgtgaccgctgcggacacggccgtatattactgtgcgagaggaatgtcggggggcgatgctttcgatatctggggccaagggaccacggtcaccgtctcctca

SEQ ID NO: 7087 - DNA, 378 bp, synthetic construct
  source 1..378: mol_type = other DNA
gaggtgcagctggtggagtctggggctgaggtgaagaagccagggtcctcggtgaaagtctcctgcaaggcttctggagacaccttcaccagacatagtatcagctgggtgcgacaggcccctggacaaggccttgagtggatgggaaggatcatccctctccctgatataccaaactacgctcagaagttccagggcagagtcacgattaccgcggacaaatccacgaacacagcctacatggagctgagcaccctgagatctgacgacacggccgtctattactgtgcgagacacaattctccggtctggggtcactatgataatagtggcccctttgactactggggccagggaaccctggtcaccgtctcctca

SEQ ID NO: 7088 - DNA, 366 bp, synthetic construct
  source 1..366: mol_type = other DNA
gaggtgcagctggtggagtctggggctgaggtgaagaaacctggggcctcagtgaaggtttcctgcaaggcatctggacacaccttcgccaactactatatacactgggtgcgacaggcccctggacaagggcttgagtggatgggaatacccaaccctagtggtggtagcacagcctacgcacacaacttccaggacagagtcaccatgaccggggacacgtccacgagcacagtctacatggagctcagcagcctgagatctgaggacacggccgtgtattactgtgcgagagggggtatagtcccagatgctaagcaatactttgactactggggccagggaaccctggtcaccgtctcctca

SEQ ID NO: 7089 - DNA, 381 bp, synthetic construct
  source 1..381: mol_type = other DNA
gaggtgcagctgttggagtctgggggaggcttggcacagcctggggggtccctgcgactctcctgtgcagcctctggattcaccctcagcagttttagtctgaactgggtccgccagactccagggaaggggctggagtgggtttcatacattaccagtagtggtactaccatatactacgcagactctgtgaagggccgattcaccatctccagagacaatgccaagaacttactgtttctgcaaatgaacagcctgagagccgaggacacggctgtctattactgtgcgagacatctctcaccaacgtcttacgattttttgagtggcccagatgcttttgatatatggggccaagggaccacggtcaccgtctcctca

SEQ ID NO: 7090 - DNA, 366 bp, synthetic construct
  source 1..366: mol_type = other DNA
gaggtgcagctgttggagtctggggctgaggtgaagaagcctggggcctcagtgaaggtttcctgcaaggcgtctggatacaccttctcccactactatatacactgggtgcgacaggcccctggacagggccttgagtggatgggaataatcaaccctagtggtgttggcacaacctatgcacagaagttccagggcagagtcaccatgaccagtgacccgtccacgagcacagtctacatggagttgagaagcctgacatctgaggacacggccgtctattactgtgcgagagattcggtaggggttccggctgctgatgcccttgatatctggggccaagggaccacggtcaccgtctcctca

SEQ ID NO: 7091 - DNA, 354 bp, synthetic construct
  source 1..354: mol_type = other DNA
gaggtgcagctgttggagtctgggggaggcttggtccagcctggggggtccctgagactctcctgtgcagcctctggattcaccgtcagtgtcaactacatgacctgggtccgccaggctccagggagggggccggagtcggtctcagtcatttatagcggaggtagcacattctacgcagactccgtgaagggcagattcaccgtctccagagaccatcccaagaacaccctgtatcttcaaatgaacagcctgagagtcgaggacacggctgtgtattattgtgcgagaggagatctcggcactccaaggattgacttctggggccagggaaccctggtcaccgtctcctca

SEQ ID NO: 7092 - DNA, 348 bp, synthetic construct
  source 1..348: mol_type = other DNA
gaggtgcagctgttggagtcgggcccaggactggtgaagccttcggggaccctgtccctcacctgcgctgtctctggtggctccatcagcggtcctaattggtggagttgggtccgccagcccccagggaaggggctggagtggattggggaaatctttcatactgggaacaccaagtacaacccgtccctcaagagtcgagccaccatatcaatagacaagtccaagaaccagttctccctgaagctgagttctgtgaccgccgcggacacggccatttattactgtgcgagaataatgggagcccttgactactgggggcagggaaccctggtcaccgtctcctca

SEQ ID NO: 7093 - DNA, 354 bp, synthetic construct
  source 1..354: mol_type = other DNA
caggtccagctggtgcagtctggagcagaggtgaaaaggccgggggagtctctgaagatctcctgtcagggttctggatacagctttatcagcaactggatcggctgggtgcgccagaagcccggcaaaggcctggagtggatgggaatcatctggcctggtgactctgatactacatacagcccgtccttccaaggccaggtcaccatctcagtggacaagtccatcagcaccgcctacctgcagtggagcagcctgaaggcctcggacaccgccatgtattactgtgcgagacgaggcagtgcctgggaaattgactactggggccacggaaccctggtcaccgtctcctca

SEQ ID NO: 7094 - DNA, 366 bp, synthetic construct
  source 1..366: mol_type = other DNA
caggtgcagctggtgcagtctgggggaggcttggtccagcctggggggtccctgagactctcctgttcagcctctggattcaccttcagtcgctattctatggactgggtccgccaggctccaggaaagggactggaatatgtttcaggtataagtagtgatggtgttaccacatactacgcagactcaatgaagggcagattcaccatctccagagacaactccaagagcactctgtatcttcaaatgagcagtctgagacctgaggacacggctgtgtattactgtgtgaaagatatcggcccgatgactccggtgactacgccagagtcctggggccagggaaccctggtcaccgtctcctca

SEQ ID NO: 7095 - DNA, 360 bp, synthetic construct
  source 1..360: mol_type = other DNA
aggtgcccgctgatggagtctggggctgcggtgaggaagcctggggcctcagtgaaggtctcctgcaaggcctccggatacaccttcaccagtcatgatatcaactgggtgcgacaggccactggacaagggctggagtggatgggatggacaaaccctaatagtggtgccacagggtatgcacagaagttccagggcagagtcaccatgaccaggaatacctccataaacacagccttcatggagctgagcagcctgagatctgacgacacggccgtttattactgtgcgagaatgtctacgactttaacgaactggttcgacccatggggccagggaaccctggtcaccgtctcctca

SEQ ID NO: 7096 - DNA, 396 bp, synthetic construct
  source 1..396: mol_type = other DNA
caggtgcagctggtggagtctgggggaggcgtggtccagcctgggaggtccctgagactctcctgtgcagcgtctggattcaccttcagtgactatggcatgcactgggtccgccaggctccaggcaaggggctggagtgggtagcacttatctggtatgatggatataataaaagatatgcagactccgtgaagggccgattcaccatctccagagacaattccaagaacacgctggatctgcaaatgaacagcctgagaggcgaggacacggctgtctattactgtgcgagagcgggcctccctactgacgccagggctctagatggttcggggaattattacactttctactttgactcctggggccagggagccctggtcaccgtctcctca

SEQ ID NO: 7097 - DNA, 384 bp, synthetic construct
  source 1..384: mol_type = other DNA
gaggtgcagctgttggagactggaggaggcttgatccagcctggggggtccctaagactctcctgtgcagcctctggattcagcgtcagtgtcaactacatgagctgggtccgccaggctccagggaaggggctggagtgggtctcagttattcataggggtggtagcacatactacccagactccgtgaggggccgattcaccatctccagagacaatccccagaacacggtgtatcttcaaatgaacagcctgagagccgaggacacggccgtctattactgtgcgacgtcacgcgtttactatgacagtggtggttacccgcaataccattactacgctatggacgtctggggccaagggaccacggtcaccgtctcctca

SEQ ID NO: 7098 - DNA, 372 bp, synthetic construct
  source 1..372: mol_type = other DNA
caggtccagctggtgcagtctggggctgaggtgaagaagcctgggtcctcggtgaaggtctcctgcaaggcttctggaggcaccttcagcagttacagtatcacctgggtgcgacaggcccctggacatgggcttgagtggatgggaaagatcatccctatgcttggtatagcagactacgcacagaagttccagggcagagctacgattaccgcggacaaatccacgagcacagcctacatggagctgagcagcctgagatctgaggacacggccgtgtatttctgtgcgagagagcggggttactctgattcggggagtgttacgtacttcgatctctggggccgtggcaccctggtcaccgtctcctca

SEQ ID NO: 7099 - DNA, 369 bp, synthetic construct
  source 1..369: mol_type = other DNA
gaggtgcagctgttggagtctgggggaggcctggtcaagcctggggggtccctgagactctcctgtgtagcctctggattcaccttcagtagttataacatgaactgggtccgccagactccagggaaggggctggagtgggtctcatctattagtggtactagtagtttcataagctacgcagactcagtgaagggtcgattcaccatctccagagacaacgccaagaactcactctatctgcaaatgaacagcctgagagtcgaggacacggctgtgtattactgtgcgagagattcccacttattacgatttttgacccagcctatggacgtctggggccaagggaccacggtcaccgtctcctca

SEQ ID NO: 7100 - DNA, 366 bp, synthetic construct
  source 1..366: mol_type = other DNA
gaggtgcagctggtggagtctgggggaggcttggtacagcctggcaggtccctgcgactctcctgtgcagcctctggattcacctttcatgattatgccatgcactgggtccgccaagctccagggaagggcctggagtgggtttcaggtattagttggaatagtggcaacatagaatatgcggactctgtgaggggccgattcgccatctccagagacaacgccaagaacttcctctatctgcaaatgaacagtatgagagttgaggacacggccttgtattattgtgtaagagatggaagaggactggaaccattaggctggttcgacccctggggccagggaaccctggtcaccgtctcttca

SEQ ID NO: 7101 - DNA, 372 bp, synthetic construct
  source 1..372: mol_type = other DNA
caggtccagctggtacagtctggggctgaggtgaagaagcctgggtcctcggtgaaggtctcctgcaaggcttctggaggcaccttcagcagttctacaatcagctgggtgcgacagccccctggacaagggcttgagtggatgggaaggatcatccctatccttgatttggcagactacgcacagaagtttcagggcagagtcaccattaccgcggacaaatccacgagcacagcctacatggagctgagcagcctgagatctgaggacacggccctctattactgtgcgagagatgtgggctactctggttcggggagttcttactactttgaccactggggccagggaaccctggtccccgtctcctca

SEQ ID NO: 7102 - DNA, 360 bp, synthetic construct
  source 1..360: mol_type = other DNA
gaggtccagctggtgcagtctggagcagaggtgaaaaagcccggggagtctctgaagatctcctgtaagacctctggatacagctttatcagcaactggatcggctgggtgcgccagatgcccgggaaaggcctggagtggatggggatcatctggcctggtgactctgataccagatacagcccgtccttccaaggccaggtcaccatctcagccgacaagtccattagcaccgcctacctgcaatggaacagcctgaaggcctcggacaccgccatgtattactgtgcgaggagtagtggaactggttacaacgactttgactactggggccagggaaccctggtcaccgtctcctca

SEQ ID NO: 7103 - DNA, 360 bp, synthetic construct
  source 1..360: mol_type = other DNA
gaggtgcagctggtggagtctgggggaggcctggcacagcctggggggtccctgagactctcctgtgcagcctctggattcaccttcagtagatacgacatgcactgggtccgccagactacaggaaaaagtctggagtgggtctcagctattggtactgctggtgacgcatactatctagactccgtgaagggccgattcaccatctccagagaaaatgccaagaactccttgtatcttcaaatgaacagcctgagagccggggacacggctgtgtatttctgtgcaagaggggatttagcagctctcgactggcacttcgatctctggggccgtggcaccctggtcaccgtctcctca

SEQ ID NO: 7104 - DNA, 360 bp, synthetic construct
  source 1..360: mol_type = other DNA
caggtgcagctggtggagtctgggggaggcatggtccagcctgggaggtccctgagactctcctgtgcagcgtctggattcaccttcagtagctacgccatacactgggtccgccaggctccaggcaaggggctggagtgggtggcagttatatggtctgatggaagtcataaacactatgcagactccgtgaagggccgattcaccatctccagagacaattccaagaacaccctgtatctgcaaatggacagcctgagagccgaggacacggctgtgtattactgtgcgagagatgacggattacctactacttactttgactcctggggccagggaaccctggtcaccgtctcctca

SEQ ID NO: 7105 - DNA, 369 bp, synthetic construct
  source 1..369: mol_type = other DNA
gaggtgcagctggtggagtcgggcccaggactggtgaaggcttcggagaccctgtccctcgcctgcactgtctctggttactccatcagcagtggttattcctggggctggatccggcagcccctagggaaggggctggagtggattgggagtatctatcatagtgggagcacctattacaaagcgtccctcaagagtcgagtcaccatatcactagacacgtccaagaaccagttctccctgaagctgagctctgtgacggccgcagacacggccgtatattactgtgcgagagatggtcaagggtacgtaccaccgagagacaactttgaccactggggccagggagccctggtcaccgtctcctca

SEQ ID NO: 7106 - DNA, 393 bp, synthetic construct
  source 1..393: mol_type = other DNA
gaggtgcagctgttggagtcgggcccaggactggtgaagccttcggggaccctgtccctcacctgcgctgtctctggtggctccatcagcactagtgactggtggagttgggtccgccagcccccagggaaggggctggagtggattggggaaatctatcatactgggagcaccaactacaacccgtccctcaagagtcgagtcaccatctctgtagacacgtccaagaaccagttctccctgacactgagctctgtgaccgccgcggacacggccatgtattactgtgcgagagctagtgagaaaggtcttctcttcggggcatacacctatacttacgtggactggtacttcgatatctggggccgtggcaccctggtcaccgtctcctca

SEQ ID NO: 7107 - DNA, 375 bp, synthetic construct
  source 1..375: mol_type = other DNA
gaggtgcagctgttggagtctgggggaggcgtggtccagcctgggaggtccctgagactctcctgtgcagcctctggattcaacttcagtaactatggcatgcactgggtccgccaggctccaggcaaggggctggagtgggtggcagttctcacatatgatggaagtaataaatactatgcaggctccgtgaagggccgattcaccatctccagagacaatgccaagaacacgctgtatctgcaaatgaacagcctgagagctgaggacacggctgtgtattactgtgcgaaacatccatgtagtggtggtagctgctaccacgaattttactttgactactggggccagggaaccctggtcaccgtctcctca

SEQ ID NO: 7108 - DNA, 381 bp, synthetic construct
  source 1..381: mol_type = other DNA
caggtgcagctggtgcagtctgggggaggcgtggtccagcctgggaggtccctgagactctcctgtgcagcctctggattcaccttcagtaggtatggcatgtactgggtccgccaggctccaggcaaggggctggagtgggtggcaaatatattatatgatggaagtaataaatactatgaagactccgtgaagggccgattcaccatctccagagacaattccaagaacacgctgtatctgcaaatgaacagcctgagagctgaggacacggctgtgtattactgtgcgaaagcctcaggggaatattgtagtggtggtagctgctacaaccactactttgactactggggccagggaaccctggtcaccgtctcctca

SEQ ID NO: 7109 - DNA, 360 bp, synthetic construct
  source 1..360: mol_type = other DNA
caggtccagctggtgcagtctggggctgaggtgaagaagcctgggtcctcggtgaaggtctcctgcaaggcttctggaggcaccttcagcagcgatagtatcagctgggtgcgacaggcccctggacaagggcttgagtggatgggaagggtcttccctatccttggtatagcaaactacgcacagaagttccagggcacagtcacgattaccgcggacaaatccacgagcacagcctacatggaaatgagcagcctgagatctgaggacacggccgtgtattactgtgcgagagaaggtggtaccaccactgaatacttccgtcactggggccacggcaccctggtcaccgtctcctca

SEQ ID NO: 7110 - DNA, 351 bp, synthetic construct
  source 1..351: mol_type = other DNA
gaggtgcagctggtggagtctggaggaggcttgatccagcctggggggtccctgagactctcctgtgcagcctctgagttcatcgtcagtagcaactacatgagctgggtccgccaggctccagggaaggggctggagtgggtctcagttatttatcccggcggtagcacattctacgcagactccgtgaagggccgattcaccatctccagagacacttccaagaacacgctgtatcttcaaatgaacagcctgagagccgaggacacggccgtgtattactgtgcgagagactacggtgactactactttgactactggggccagggaaccctggtcaccgtctcctca

SEQ ID NO: 7111 - DNA, 378 bp, synthetic construct
  source 1..378: mol_type = other DNA
gaggtgcagctggtggagtctgggggaggcgtggtccagcctgggaggtccctgagactctcctgtgcagcctctggattcacctttagtagttatgacatacactgggtccgccagactccaggcaaggggctggagtgggtggcacttatctcatctgatggaagtaataaatattatgcagactccgtgaagggccgattcaccatctccagagacaattccaagaacacgttgtatctgcaaatgaacagcctgagaactgaggacacggctgtgtattactgtgtgaaaggaaaggagttgagagcagcagctggtaggacctaccgtccccttgactactggggccagggaaccctggtcaccgtctcctca

SEQ ID NO: 7112 - DNA, 381 bp, synthetic construct
  source 1..381: mol_type = other DNA
caggtgcagctggtgcagtctgggggaggtgtggtacggcctggggggtccctgagactctcctgtgcagcctctggattcacctttggtgattatggcatgaactgggtccgccaagttccagggaaggggctggagtgggtctctggtattaattggaatggtggtaggacagggtatgcagaccctgtgaagggccgattcaccatctccagagacaacgccaagaactccctatatctgcaaatgaacagtctgagagccgaggacacggccttgtactactgtgcgagagggggggccatattccgatattttgacttgttatcctccgaggggatggacgtctggggccaagggaccacggtcaccgtctcctca

SEQ ID NO: 7113 - DNA, 378 bp, synthetic construct
  source 1..378: mol_type = other DNA
caggtgcagctgcagcagtctggggctgaggtgaagaagcctgggtcctcggtgaaggtctcctgcaaggcttctggaggcaccttcagcagctattctatcagctgggtgcgacaggcccctggacaaggacttgagtggatgggaaggatcatccctctccttggtataccaaactacgcacagaagatgcagggcagagtcacgattaccgcggacaaatcaacgagcacagcctacatggagctgagcagcctgagatctgaggacacggccgtgtattactgtgcgagagaaaattgttttggtacctcctgctctaccccgtggggtgcttttgatatctggggccaagggaccacggtcaccgtctcctca

SEQ ID NO: 7114 - DNA, 387 bp, synthetic construct
  source 1..387: mol_type = other DNA
caggtgcagctgctggagtccggcccaggactggtgaagccttcggagaccctgtccctcacctgcggtgtctctggttactccatcagcagtggttactactggggctgggtccggcagcccccagggaaggggctggagtggattgggagtatctatcatagtgggaggacctactacaacccgtccctccagagtcgagtcaccatatcagttgacacgtccaagaaccagttctccctgaaactgacctctgtgaccgccgcagacacggccgtgtattactgtgcgagagtgggggcgtattgtggtggtggtcactgctaccccgaagacaaacaatcaccggactactggggccagggaaccctggtcaccgtctcctca

SEQ ID NO: 7115 - DNA, 366 bp, synthetic construct
  source 1..366: mol_type = other DNA
gaggtgcagctgttggagtcgggcccaggactggtgaagccttcggagaccctgtccctcacctgcactgtctctggtggctccatcagtagttactactggacctggatccggcagcccccagggaagggactggagtggattggatatacctcttacagtgggagcaccaactacaacccctccctcaagagtcgagtcaccatatcagtagacacgtccaagaaccagttctccctgaagctgacctctgtgaccgctgcggacacggccgtctattactgtgcggctgattactatgatagtactggttaccactacggtatggacgtctggggccaagggaccacggtcaccgtctcctca

SEQ ID NO: 7116 - DNA, 357 bp, synthetic construct
  source 1..357: mol_type = other DNA
caggtccagctggtgcagtctggagcagaggtgaaaaagcccggggagtctctgaagatctcctgtaagggttctggatacagctttacccactactggatcggctgggtgcgccagatgcccgggaaaggcctggagtggatggggatcatctatcctggtgactctgataccagatacagcccgtccttccaaggccaggtcaccatctcagccgacaagtccatcagcaccgcctacctgcagtggagcggcctgaaggcctcggacaccgccatgtattactgtgcgagacagggcacgacagtaggacactttgactactggggccagggaaccctggtcaccgtctcctca

SEQ ID NO: 7117 - DNA, 372 bp, synthetic construct
  source 1..372: mol_type = other DNA
gaggtgcagctggtggagtctgggggaggcttggtacagcctggcaggtccctgagactctcctgtgcagcctctggattcacctttgatgattatgccatgcactgggtccggcaagctccagggaagggcctggagtgggtctcaggtattagttggaacagtgctagcataggctatgcggactctgtgaagggccgattcaccatctccagagacaacgccaagaactccctgtatctgcaaatgaacagtctgagagctgaggacacggccttttattactgtgcaaaagatttatctataaactggggatccccactctccggtatggacgtctggggccaagggaccacggtcaccgtctcctca

SEQ ID NO: 7118 - DNA, 363 bp, synthetic construct
  source 1..363: mol_type = other DNA
caggtgcagctggtgcagtctgggggaggcgtggtccagcctgggaggtccctgagactctcctgtgcagcgtctggattcaccttcagtagctatggcatgcactgggtccgccaggctccaggcaaggggctggagtgggtggcagttatatggtatgatggaagtaataaatactatgcagactccgtgaagggccgattcaccatctccagagacaattccaagaacacgctgtatctgcaaatgaacagcctgagagccgaggacacggctgtgtattactgtgcgagagctcgaggctggggagtgggagctactattgactactggggccagggaaccctggtcaccgtctcctca

SEQ ID NO: 7119 - DNA, 366 bp, synthetic construct
  source 1..366: mol_type = other DNA
cgaggtgcagctggtggagtctgggggagacttggtacagccagggggtccctgagactctcctgcgcagcctctggatttacctttagcagttttcccatgagcggggtccgccaggctccagggaaggggctagagtgtgtttcaattatcactactagtggtggtaccacatatcccgactccgttaagggccggttcaccatctccaaagacacttgtaagaacaccctgtatgggcaaatgaacagcctgagagccgaggacacggccgtatattactgtgacaagtccgaggcgtatggcactggctggtacggaaaaaatgactactgggcccagggaaccctggtcacagtttcatca

SEQ ID NO: 7120 - DNA, 354 bp, synthetic construct
  source 1..354: mol_type = other DNA
gaggtgcagctggtggaatctggaggaggattggtgcaaactgggggctctctgagactctcctgtgcatcctcgggattcaccttcgcgaattactatatgacctgggtccgacaggctccaggcaagggactggagtgggtggccgctgttgatagcgacggcagtaggacatactatgcagactccgtaaggggccgattcaccatctccagagacaacgccaagagcaccttatatctgcaaatgaataatctgaattctgaagacacggccgtgtattactgtgcccgaactaggcactacgacggcctggatcactggggcacagggaccctggtcaccgtctcctca

SEQ ID NO: 7121 - DNA, 372 bp, synthetic construct
  source 1..372: mol_type = other DNA
ctaggtgcagctggtgcagtctgggggaggcttggtccagctggggggtccctgagaatttcttgtgcagcttctgggttcaccgtcagtagcaactacatgagctgggtccgccaggctccaggaaagggggtggagtgggtttcatttatttatagcggtggtagcacattctaccgagattccgtaaagggccgattccccatctccagagacaaatccaagaacacactgtatcttcaaatgaacagcctgagacctgaggacacggctgtgtattactgtgtgagagaaatatatggttgtaccagctgccaacacgggatcccacgggaccactggggccagggaaccctggtcaccgtttcctca

SEQ ID NO: 7122 - DNA, 387 bp, synthetic construct
  source 1..387: mol_type = other DNA
gaggtgcagctgttggagtcgggcccaggactggtgaagccttcacagaccctgtccctcacctgctctgtctctggtggctccgtcggcagtggtgatttctactggaactggatccgccaccacccggggaagggcctggagtggattgggtacatccattacagtgggagcaccttctacaacccgtccctcaagaatcgagttaccatatcactggacacggctaagaaccagctctccctgaagctgggctctgtgactgccgcggacacggccatatattactgtgcgcgagccccctgtagtggtggtggctgctattacggctctttgcgcggggcttttgactactggggccagggaaccctggtcaccgtctcctca

SEQ ID NO: 7123 - DNA, 381 bp, synthetic construct
  source 1..381: mol_type = other DNA
gaggtgcagctgttggagtctgggggaggcgtggtccagcctgggaggtccctgagactctcctgtgcaacctctggattccccttcaatacccatggcttgaactgggtccgcctggctccaggcaaggggctgcagtgggtggcagttatatcctatgatggaaattataaatactatgcggactccgtgaagggccgattcaccatcgccagagacaattccaagaacacgatgtatctacaaatgaacagcctgagacctgacgacacggctgtgtattactgtgggagagcacgatcgactttttgtactagttccagctgctactctgctgcttttgatttcgggggccaagggaccacggtcaccgtctcctca

SEQ ID NO: 7124 - DNA, 369 bp, synthetic construct
  source 1..369: mol_type = other DNA
gaggtgcagctggtgcagtctgggggaggcgtggtccagcctgggaggtccctgagactctcctgtgcagcctctggatttacgttcagtagttatgctatgcactgggtccgccagactccagacaaggggctggagtgggtggcggttatactagatgatggaagaggtaaattctacgcagactccgtgaagggccgattcaccatctccagagacaatctcaagaacacactatatctgcaaatgaacaccgtgggagttgaggacacggctgtgtattactgtgcgagagactccagcaccgcggactctctagttagctggttcgacccctggggccagggaaccctggtcaccgtctcctca

SEQ ID NO: 7125 - DNA, 390 bp, synthetic construct
  source 1..390: mol_type = other DNA
ttaggtgcagttggggagtcgggcccagggctggtgaagccttcacagaccctgtccctcacttgcactgtgtctggtcattccattatcagtggttcttactacagtagttggatccgccagctcccaggaaagggcctggagtggatcgggtacatgtattacagtggtagcacgtattacaacccgtccctcaagagtcgacttaccatatcaatagacacgtttaagaaccagtactccctgaagctgagctctgttactgccgcggacacggcggtttattactgtgtgagagagtctattgtagtagcaccagcagccgggacgtacccctcctactacggtattgacgtctggggccaagggaccacggtcaccgtctcctca

SEQ ID NO: 7126 - DNA, 354 bp, synthetic construct
  source 1..354: mol_type = other DNA
caggtccagctggtgcagtctggggctgaggtgaagaagcctgggtcctcggtgaaggtctcctgcaaggcttctggagacaccttcagtaattatgctattacctgggtgcgacaggcccctggacaaggacttgagtggatgggaaggatcatccctatttttggtataacaaatatcgcacagaagttccagggcagagtcaccattagcgcggacaaatccacgggaacaacctacatggaactgagcagcctcagatctgaggacacggccgtgtatttttgtgcgagaggtagaaccgacgactaccttgactcctggggccagggaaccctggtcaccgtctcctca

SEQ ID NO: 7127 - DNA, 351 bp, synthetic construct
  source 1..351: mol_type = other DNA
gaggtgcagctggtggagtctgggggaggcttggtccagccgggggggtccctgagactctcctgtgcagcctctggaatcatcgtcagtaggaactacatgaactgggtccgccagactccggggaaggggctggagtgggtctcagtcctttatagcggtgggacaacattctacgcagactccgtgaagggccgattcaccatctccagagacacttccaagaacactctgtatcttcaaatgaacagcctgagacttgaggacacggctgtctattactgtgcgagagatttccacgaaggtgcttttgatatctggggccaagggaccacggtcaccgtctcctca

SEQ ID NO: 7128 - DNA, 387 bp, synthetic construct
  source 1..387: mol_type = other DNA
cccgtgcagctgttggagtcgggcccaggactggtgaagccttcggagaccctgtccctcacctgcactgtctctggtggctccatcggtacttcctactggagctggatccggcagcccccagggaacggactggagtggattgggaatatctttaaaactggaagaaccaactacaacccctccctcaagagtcgcgtcaccatatcagtagacacgtccaagaaacaattctccctgaggctgagctctgtgaccgctgcggacacggccgtgtatttctgtgcgagggcttatacgcattccgatttttggagtggatattctgactactacgactactacatggacgtctggggcaaagggaccacggtcaccgtctcctca

SEQ ID NO: 7129 - DNA, 354 bp, synthetic construct
  source 1..354: mol_type = other DNA
gaggtgcagctgttggagtcgggcccaggactggtgaagccttcggagaccctgtccctcacctgcactgtctctggtgactccatcagtggttactactggagctggctccggcagcccccagggaagggactggagtgggttggctatatctatgacaatgggaacaccaactacaacccctccctcaagagtcgagtcaccatatcactagacacgtccaagaaccagttctccctgatactgagcgctgtgaccgctgcggacacggccgtcttttactgtgcgcgaggactaactacgggtgatgcttttgatctctggggccaagggaccacggtcaccgtctcctca

SEQ ID NO: 7130 - DNA, 354 bp, synthetic construct
  source 1..354: mol_type = other DNA
gaggtgcagctgttggagtcgggcccaggactggtgaagccttcggagaccctgtccctcacctgcactgtctctggtgactccatcagtggttactactggagctggctccggcagcccccagggaagggactggagtgggttggctatatctatgacaatgggaacaccaactacaacccctccctcaagagtcgagtcaccatatcactagacacgtccaagaaccagttctccctgatactgagcgctgtgaccgctgcggacacggccgtcttttactgtgcgcgaggactaactacgggtgatgcttttgatctctggggccaagggacaatggtcaccgtctcttca

SEQ ID NO: 7131 - DNA, 387 bp, synthetic construct
  source 1..387: mol_type = other DNA
gaggtgcagctgttggagtctgggggaggcttggtacagcctggggggtccctgagactctcctgtgcagcctctggattcacctttaccaactgtgccatgggctgggtccgccaggctccagggaaggggctggagtgggtctcaactattggtgatagtggtcgtagcacatactacgcagactccgtgaagggccggttcaccatctccagagacaattccaagaacacgctgcatctgcgaatgaacagcctgagagccgacgacacggccgcatattactgtgcgaaaaacctcgacaccccgaactacgacgccgacgattactactactactacggtatggacgtctggggccaagggaccacggtcaccgtctcctca

SEQ ID NO: 7132 - DNA, 357 bp, synthetic construct
  source 1..357: mol_type = other DNA
caggtccagctggtgcagtctggagcagaggtgaaagagccgggggagtctctgaggatctcctgtaagggttctggatacagctttaccagccactggatcggctgggtgcgccagatgcccgggaaaggcctggagtggatgggggccgtctttcctggtgactctgataccagatacagcccgtccttccaaggccaggtcaccatctcagccgacaagtccatcagcaccgcctacctacactggagcggcctgaagacctcggacaccgccatgtattactgtgcgagactggggtacagctatgacacgggtgactactggggccagggaaccctggtcaccgtctcctca

SEQ ID NO: 7133 - DNA, 366 bp, synthetic construct
  source 1..366: mol_type = other DNA
gaggtgcagctgttggagtctggggctgaggtgaagaagcctggggcctcagtgaaggtttcctgcaagacatctggatacaccttcaccaaccactatatgcactgggtgcgccaggcccctggacaagggcttgagtggatgggaataatcaaccctgatggtggtagcagaacctacgcacagaagttccagggcagagtcaccatgaccagcgacacgtccacgagcacagtgtacatggagttgagcagcgtgagatatgaggacacggccgtgtattactgtgcgagagattttgcctttataccagcagctggtccgtttgaatattggggccagggaaccctggtcaccgtctcctca

SEQ ID NO: 7134 - DNA, 357 bp, synthetic construct
  source 1..357: mol_type = other DNA
gaggtgcagctggtggagtctgggggaggcttggtccagcctggagggtccctgagactctcttgtgcagcctctggattcacctttagtgcctattggatgacctgggtccgccaggctccagggaaggggctggagtgggtgcccaacataaagcaagatggaagtgagaaatactatgtggactctgtgaagggccgattcaccatctccagagacaacgccaagaacgcactgtatctgcaaatcaacagcctgagagccgaggacacggccgtgtatacttgtgcgcgagttttctggctgcgcggcggggttgacttctggggccagggaaccctggtcaccgtctcctca

SEQ ID NO: 7135 - DNA, 351 bp, synthetic construct
  source 1..351: mol_type = other DNA
gaggtgcagctggtggagactggaggaggcttgatccagccgggggagtccctgagactctcctgtgcagcctctgagatcatcgtcagtaggaactacatgagctgggtccgccaggctccagggaaggggctggagtgggtctcagttatttttcccggtgggagcacttactacgcagactccgtgaagggccgattcaccatctcccgagacgattccaagaacacgctgtatcttcaaatgaacagcctgagagccgaggacacggccgtctattactgtgcgagagaagacaataataatgcttttgatatttgggggcaagggaccacggtcaccgtctcctca

SEQ ID NO: 7136 - DNA, 393 bp, synthetic construct
  source 1..393: mol_type = other DNA
caggtgcagctgttggagtctgggggaggcttggtacagcctggggggtccctgagactctcctgtgcagcctctggattcacctttagcaactatgccatgagttgggtccgccagtctccagggaaggggctggagtgggtctcagctattagtggtagtggtgatgacacatactacgcagactccgtgaagggccggttcaccatctccagagacaattccaagaacacgctgtatctgcaaatgagcctcctgagagccgaggacacggccgtatatttctgtgcgaaacagtcggttaaccgaaacccaggatgggacttcctagtgtctaccactgaggactactttgactcttggggccagggaaccctggtcaccgtctcctca

SEQ ID NO: 7137 - DNA, 381 bp, synthetic construct
  source 1..381: mol_type = other DNA
gaggtgcagctggtggagtctggagctgaggtgaagaagcctggggcctcagtgaaggtctcctgcaaggcttctggttacaccttttccagttttggtgtcagctgggtgcgacaggcccctggacaagggcttgagtggatggggtggatcagtacttacgaaggtaacacaaactatgcacagaacttccagggcagagtcaccatgaccacggacacatccacgagcacagcctacatggagctgaggagcctgagatctgacgacacggccgtctattactgtgcgagagtcttcagttactatgatagtagtggttgggggactgcttactactttgactcctggggccagggaaccctggtcaccgtctcctca

SEQ ID NO: 7138 - DNA, 384 bp, synthetic construct
  source 1..384: mol_type = other DNA
gaggtgcagctgttgcagtctggggctgaggtgaagaagcctgggtcctcggtgaaggtctcctgcaaggcttctggaggcagcttcagtaactatggtatcagctgggtgcgacaggcccctggacaagggcttgagtggatgggagggatcatccctatgtttggtgcagcaaaatacgcacagaagttccagggcagagtcaggattatcgcggacgaatccacgagcacagcctatatggagctgagcagcctgagatctgaggacacggccgtatattactgtgcgagagacgaagctacgataacagtggttcagggggtcgccacccgtcatggttatgatatctggggccaagggaccacggtcaccgtctcctca

SEQ ID NO: 7139 - DNA, 369 bp, synthetic construct
  source 1..369: mol_type = other DNA
gaggtgcagctgttggagtctgggggaggcttggtacagcctggcaggtccctgagactctcctgtgcagcctctggattcaccttcgatgattatgccatgcactgggtccggcaagctccagggaagggcctggagtgggtctcaggtattacttggaatagtggtaccataggctatgcggactctgcgaagggccgattcaccatctccagagacaactccaagaactccctgtatctgcacatcagcagtctgagaactgaggacacggccttgtattactgtgcaaaagatacaggatccaaggactactattactacggtatggacgtctggggccaagggaccacggtcaccgtctcctca

SEQ ID NO: 7140 - DNA, 363 bp, synthetic construct
  source 1..363: mol_type = other DNA
caggtgcagctggtggagtctggagctgaggtgaagaagccgggggcctcagtgaaggtctcttgcaaggcttctggttacaggttcaacatctatggtatcacctgggtgcgacaggcccctggacaagggcttgagtggatgggatggagcagcgcttacaatggtaacacaaactatgcacagaagctccagggcagagtcaccatgaccacagacacatccacgagtacagcctacatggagttgaggagcctgacatctgacgacacggccgtgtattactgtgcgagagcattgggggaaggttcggggtcagtctttgggtactggggccagggaaccctggtcaccgtctcctca

SEQ ID NO: 7141 - DNA, 372 bp, synthetic construct
  source 1..372: mol_type = other DNA
gaggtgcagctgttggagtctgggggaggcttggtacagcctggcaggtccctgagactctcctgtgcagcctctggattcacctttgatgattatgccatgcactgggtccggcaagctccagggaagggcctggagtgggtctcaggtattagttggaatggtggtatcattaactatgcggactctgtgaagggccgattcatcatctccagagacaacgccaagaactccctgtatctgcaaatgatccgtctgagagctgaggacacggccttgtattactgtgcaaaatccagttccgtcggggacgagggggagttctcgtcttttgactactggggccagggagccctggtcaccgtctcctca

SEQ ID NO: 7142 - DNA, 366 bp, synthetic construct
  source 1..366: mol_type = other DNA
caggtgcagctggtggagtctgggggaggcttggtacagccgggggggtccctgagactctcctgtgcagcctcgggattcacctttagcagctatgccatgagctgggtccgccaggctccagggaaggggctggagtgggtcgcaggtgttagtggtagtggtgatggcagattctacgcagactccgtgaagggccggttcaccatctccagagacaattccaagaacacgctctatctgcaaatgaacagcctgagagccgaggacacggccgtatattactgtgggaaagatagtaaccttattactcaaatagtagttgatgagtactggggccagggaaccctggtcaccgtctcctca

SEQ ID NO: 7143 - DNA, 363 bp, synthetic construct
  source 1..363: mol_type = other DNA
gaggtccagctggtggagtctgggggcggcgtggtccagcttgggaggtccctgagactctcctgcgcagcgtcaggattcaccttcagtgactataacatgcactgggtccgccaggctccaggcaaggggccggagtgggtggcagttatatggtatgatggaagcgataaatattatgcagactccgtgaagggccgattcaccatctccagagacaattccaagaacactctgtatctgcaaatgaatagcctgagagccgaggacacggctgtgtattactgtgcggcaaatggctacactccaggtggggacttcttcgatccttggggccacggaaccctggtcaccgtctcctca

SEQ ID NO: 7144 - DNA, 363 bp, synthetic construct
  source 1..363: mol_type = other DNA
caggtccagctgaagcagtctggtcctacgctggtgaaacccacacagaccctcacactgacctgcaccttctctgggttctcactcagcacttatggagtgggtgtgggctggatccgtcagcccccaggaaaggccctggagtggcttgcactcatttattacgatgatgataagcgctacagcccatctctgaagagcaggctcaccatcaccaaggacacctcccagaaccaggtggtccttacaatgaccaacatggaccctgtggacacagccacatattactgtgcccgacacactatagcgacgatttttgacttcgactcctggggccagggaaccctggtcaccgtctcctca

SEQ ID NO: 7145 - DNA, 384 bp, synthetic construct
  source 1..384: mol_type = other DNA
gaggtgcagctggtggagtctgggggaggcctggtcaagcctggggggtccctgagactctcctgtgcagcctctggattcaccttcagtacctataccatgaactgggtccgccaggctccagggaaggggctggagtgggtctcatccattagtagtagtaataatttcatatactacgcagactcagtcaagggccgattcaccatctccagagacaacgccaagaactcagtgtatctgcaaatgaacagcctgagagccgaggacacggctgtgtattactgtgcgaaagatctaacctactactatgatagtagtgattattacgggcctaatgcttttgatatctggggccaagggaccacggtcaccgtctcctca

SEQ ID NO: 7146 - DNA, 387 bp, synthetic construct
  source 1..387: mol_type = other DNA
gaggtgcagctgttggagtctgggggaggcgtggtccagcctgggacgtccctgagactctcctgtgcagcctctggattcaccttcaggagctatgctatgcactgggtccgccaggctccaggcaaggggctagagtgggtggcagctatatcatatgatggaagtaataaatacttcgcagactccgtgaagggccgattcaccatctccagagaccattccaagaacacgctgtatctgcaaatgaacagcctgagagctgcggacacggctgtgtattactgtgcgagagatcctagtggtactatggttcggggaggtattgtatactatcactacggtatggacgtctggggccaagggaccacggtcaccgtctcctca

SEQ ID NO: 7147 - DNA, 384 bp, synthetic construct
  source 1..384: mol_type = other DNA
gaggtgcagctacagcagtggggcgcaggactgttgaagccttcggagaccctgtcccgcacctgcgctgtctatggtgggtccttcagtggttactactggagctggatccgccagtccccagggaaggggctggagtggattggggaaatcaatcatagtggaagcaccaactacaacccgtccctcaagagtcgagtcaccatatcagtagacacgtccaagagccagttctccctgaagctgaactctgtgaccgacgcggacacggctgtatattactgtgcgagaggcaaagccatctacgatttttggcgtggttataatggccgcgcccttaactttgacaactggggccagggaaccctggtcaccgtctcctca

SEQ ID NO: 7148 - DNA, 363 bp, synthetic construct
  source 1..363: mol_type = other DNA
caggtgcagctgttggagtctggggctgaggtgaagaagcctgggtcctcggtgaaggtctcctgcaaggcttctggaggcagcttcagcagtgatgctatcaactgggtgcgacaggcccctggacaagggcttgagtggatgggagggatcaaccctatttttggtacagcaaactacgcacagaagttccggggcagagtcacgattaccgcggacgaatccacgagcacagcctacatggagctgagcagcctgagatctgaggacacggccgtgtactattgtgcaaaagatcaggttacttcgcccctctacgggatggacgtctggggccaagggaccacggtcaccgtctcctca

SEQ ID NO: 7149 - DNA, 354 bp, synthetic construct
  source 1..354: mol_type = other DNA
gaggtgcagctgttggagtcgggcccaggactggtgaagccttcggagaccctgtccctcacctgcactgtctctggtgactccatcagtagttactactggagctggatccggcagcccccagggaagggactggaatgggttgggtatatctattacagtgggagcaccgactacaacccctccctcaagagtcgagtcaccatatcagtagacacgtccaagaaccaattctacctgaagctgagctctgtgaccgctgcggacacggccgtgtattattgtgcgagagggggtggctacggtgactactttgactactggggccagggaaccctggtcaccgtctcttca

SEQ ID NO: 7150 - DNA, 372 bp, synthetic construct
  source 1..372: mol_type = other DNA
caggtccagctggtgcagtctggggctgaggtgaagaagcctgggtcctcggtgaaggtctcctgcaaggcttctggaggcaccttcagcagttatgctatcaactgggtgcgacaggcccctagacaagggcttgagtggatgggtaggatcatccctctccttggtatagcaaactacgcacagaagttccagggcagagtcacgattaccgcggacaaatccacgagcacagcctacatggaggtgagcagcctaagatctgaggacacggccgtgtattactgtgcgcgttctgccccccttgctggaactccgccggccaactggttcgacccctggggccagggaaccctggtcaccgtctcctca

SEQ ID NO: 7151 - DNA, 345 bp, synthetic construct
  source 1..345: mol_type = other DNA
gaggtgcagctggtggagactggaggaggcttgatccagcctggggggtccctgagactctcctgtgcagcctctgggctcaccgtcagtagcaactacatgagctgggtccgccagactccagggaaggggctggagtgggtctcagttatttatagcggtggtagcacattctacgcagactccgttaagggccgattcaccatctccagagacaaatccaagaacacgctgtatcttcaaatgaacagcttgagagccgaggacacggccgtgtattattgtgcgagaatgccttacggtatggacgtctggggccaagggaccacggtcaccgtctcctca

SEQ ID NO: 7152 - DNA, 360 bp, synthetic construct
  source 1..360: mol_type = other DNA
gaggtgcagctgttggagtctgggggaggcttggtacagcctggcaggtccctgagactctcctgtgcagcctctggattcacctttgatgattatgccttgcactgggtccggcaagctccagggaagggcctggagtgggtctcaggtattagttggaatagtgttagcatagactatgcggactctgtgaagggccgattcaccatctccagagacaacgccaagaactccctgtatctgcaaatgaacagtctgagagctgaggacacggccttatattactgtgcaaaagagggatgtagtagtaccagctgctacgactactggggccagggaaccctggtcaccgtctcctca

SEQ ID NO: 7153 - DNA, 372 bp, synthetic construct
  source 1..372: mol_type = other DNA
caggtgcagctggtgcagtctggagcagaggtgaaaaagcccggggagtctctgaagatctcctgtaagggttctggatacgactttagcaacctctggatcggctgggtgcgcctgatgcccgggaaaggcccggagtggatggggatcatctctcctcccgactctgataccagatacaacccgtccttcgaaggccaggtcaccatctcagtcgacaactccatcaataccgcctacctgcagtggaacagcctgaaggcctcggacaccgccatctattactgtgcgagacacttaggagtagaattgggtacaatacgcggttattttgactcctggggccagggaaccctggtcaccgtctcctca

SEQ ID NO: 7154 - DNA, 360 bp, synthetic construct
  source 1..360: mol_type = other DNA
caggtgcagctacagcagtggggcgcagggctgttgaagccttcggagaccctgtccctcacttgtgctgtctatgatgagtccttcagagattacttctggaattggatccggcaacccccaggtcaggggctggagtggatgggggaagtcactcatactggaaacatcaactacaacccgtcccttaagagtcgagtcaccatatccgtggacacgtccaagaaccaaatctccctgaacctgaggtctgtgagcgccgcggacacggccgtttattactgtgcgagaggcgatttttatagcaccaggctcgcttttgatatctggggccaagggaccacggtcaccgtctcctca

SEQ ID NO: 7155 - DNA, 360 bp, synthetic construct
  source 1..360: mol_type = other DNA
caggtgcagctgcagcagtcgggcccaggactaggactggtgaagccctcggagaccctgcccctcacctgcactgtctctggtgactccatcagtggttactactggagctggatccggcagcccccagggaagggactggagtggattggctatatctataatagtgagactactgagtacaacccctccctcaagagtcgagtcaccatctcagtagacacgtccaagaaccagatctccctgaagctgagctctgtgaccgccgcagacacggccgtgtattactgtgcgagaggggctcagtacggcgacttctttgactactggggccagggaaccctggtcaccgtctcctca

SEQ ID NO: 7156 - DNA, 372 bp, synthetic construct
  source 1..372: mol_type = other DNA
gaggtgcagctggttggagtctgggggaggcgtggtccagctgggaggtccctgagactctcctgtgcagcctctggattcaccttcagtagctatgaaatccactgggtccgccaggctccaggcaaggggctggagtgggtgacacttatatcatatgacggaagcaataaatactacgcagactccgtggagggccgattcaccatctccagagacaattccaagaacacgctgtatctgcaaatgaacagcctgagacctgaggacacggctgtgtattactgtgcgagagcaaagcagtgggtgcaacgggggtactactaccctatggacgtctggggccaaggaaccacggtcaccgtctcctca

SEQ ID NO: 7157 - DNA, 384 bp, synthetic construct
  source 1..384: mol_type = other DNA
gaggtgcagctgttggagtctgggggaggcgtggtccagcctgggaggtccctgagactctcctgcgcagcctctggattcaccttcagtcactatggcatgcactgggtccgccaggctccaggcaaggggctggagtgggtggcactgatttcatatgatggaaccaaaacatcctatgcagactccgtgaagggccgattcaccatctccagagacaattcgaagaacacactgctcctggaaatgaacagcctgagaggtgaagacacggctgtgtattactgtgcgaaaagggtcgatacatattgttatgctgattgcttgggatttcccaccacccttgactattggggccagggaaccctggtcaccgtctcctca

SEQ ID NO: 7158 - DNA, 366 bp, synthetic construct
  source 1..366: mol_type = other DNA
gaggtgcagctggtggagtctggggctgaggtgaagaagcctggggcctcagtgaaagtttcctgcaaggcatctggatatacgttcacaacctactatgttcactgggtgcgacaggcccctggacaagggcttgagtggatgggaataatcaaccctgatgctggaagcaccacgtacggacagcaattccggggcagagtcaccatgaccagcgacacgtccacgagcacagtctacatggagctgagtagcctgagatctgaggacacggccgtatattactgtgcgagagatatttttttagtaccagccataagcgctatggaagtctggggccaggggaccacggtcaccgtctcctca

SEQ ID NO: 7159 - DNA, 366 bp, synthetic construct
  source 1..366: mol_type = other DNA
gaggtgcagctgttggagtcgggcccaggactggtgaagctttcggagaccctgtccctcacctgcaaagtctctggtggctccttcagtaattactactggagctggattcggcagccccccgggaagagactggaatggattggatatatcttctacagtgggagcaccaactacaacccctccctcaggagtcgactcaccatatcagtagacacgtccaagaaccaattctccctgaacctgagatctgtgaccgctgcggacacggccgtgtattactgtgcgagagatctcggatatagcagtggctggcctgatgcttttgatatctggggccaagggaccacggtcaccgtctcctca

SEQ ID NO: 7160 - DNA, 363 bp, synthetic construct
  source 1..363: mol_type = other DNA
gaggtgcagctggtggagtccgggggaggcgtggtccagcctgggaggtccctgagactctcctgtgcagcctctggattcaccttccgtaggtctgttatgcactgggtccgccaggctccaggcaaggggctggagtgggtggcagatgtatcatctgatggaagcattaaaacctacgcagactccgtgaagggccgattcaccatctccagagacaattccaagtacacgctgtatctgcaaatgaacagcctgagagctgaggacacggctgtgtattactgtgcgagagatgtggatacagctatggttactattcttgactactggggccagggaaccctggtcaccgtctcctca

SEQ ID NO: 7161 - DNA, 363 bp, synthetic construct
  source 1..363: mol_type = other DNA
gaggtgcagctgttggagtccgggggaggcgtggtccagcctgggaggtccctgagactctcctgtgcagcctctggatttaccttcggtagctatgttatgcactgggtccgccaggctccaggcaaggggctggagtgggtggcagatgtatcatctgatggaagcattaaaacctacgcagactccgtgaagggccgattcaccatctccagagacaattccaagtacacgctgtatctgcaaatgaacagcctgagagctgaggacacggctgtgtattactgtgcgagagatgtggatacagctatggttactattcttgactactggggccagggaaccctggtcaccgtctcctca

SEQ ID NO: 7162 - DNA, 351 bp, synthetic construct
  source 1..351: mol_type = other DNA
caggtgcagctgttggagtctgggggagggttggtccagcctggggggtccctgagactctcctgtgcagcctctggagtcaccgtcagtgccaactacatgaggtgggtccgccaggctccagggaaggggctggagtgggtctcaattatttatagcggtggaagcacattttacgcagactccgtgaaggacagattcaccatctccagagacaactccaagaacacactgtatcttcaaatgaacagcctgcgagccgaggacacggctgtctattactgtgcgagagacttagaacagttcgggatcgatctctggggccgtggcaccctggtcaccgtctcctca

SEQ ID NO: 7163 - DNA, 381 bp, synthetic construct
  source 1..381: mol_type = other DNA
caggtgcagctggtgcagtctgggggaggcgtggtccagcctgggaggtccctgagactctcctgtgcagcctctggattcaccttcagaagttatggcatgcactgggtccgccaggctccaggcaaggggctggagtgggtggcagttatattatatgatggaagtgacaaatactatgcagactccgtgaagggccgattcaccatctccagagacaattccaagaacacgctgtatctgcaaatgaacagtctgaaacgtgaggacacggctgtgtactactgtgcgaaacagatggggtcacattgtagtgctgggaactgctactcagctacttttgactactggggccagggaaccctggtcaccgtctcctca

SEQ ID NO: 7164 - DNA, 345 bp, synthetic construct
  source 1..345: mol_type = other DNA
gaggtgcagctggtggagtctggaggaggcttggtccagcctggggggtccctgagactctcctgtacagcctctgggatcaccgtcagtagcaactacatgagttgggtccgccaggctccagggaaggggctggagtgggtctcagttgtttatgccggaggtagcacattctatgcagactccgtgaagggccgattcaccatctccagacacaattccaagaacacactgtatcttcaaatgaacagtctcagagttgaggacacggccgtgtattactgtgcgagagaggcttatgcctttgatatctggggccaagggaccacggtcaccgtctcctca

SEQ ID NO: 7165 - DNA, 366 bp, synthetic construct
  source 1..366: mol_type = other DNA
gaggtgcagctggtgcagtctggggctgaggtgaggaagcctggggcctcagtgaaggtttcctgcaaggcatctggatacaccttcaccaactactatatacactgggtgcgacaggcccctggacaagggcttgagtggatgggaataatcaaccctagtgctggtagcacaagctacgcacagaagttccagggcagagtcaccatgaccacggacacgtccacgagcacagtctacatggagctgagcagcctgagatctgaggacacggccatatattactgtgcgagagatattgtacaaataacagctgctatggggcttgagtactggggccagggaaccctggtcaccgtctcctca

SEQ ID NO: 7166 - DNA, 363 bp, synthetic construct
  source 1..363: mol_type = other DNA
gaggtgcagctggtggagtctgggggaggcgtggtccagcctgggaggtccctgagagtctcctgtgcagcctctggattcaccttcagttcctatgctatgcactgggtccgccaggctccaggcaaggggctggagtgggtggcagttatatcatatgatggacacaataaatactacgcagattccgtgaagggccgattcaccatctccagagacaattccaagaacacgctgtatctgcaaatggacagcctgagagctgacgagacggctgtgtattactgtgcgagaggggtaaggtggaacggtgactacgccgttgactactggggccagggaaccctggtcaccgtctcctca

SEQ ID NO: 7167 - DNA, 360 bp, synthetic construct
  source 1..360: mol_type = other DNA
gaggtgcagctgttggagtcgggcccaggactggtgaggccttcacagaccctgtccctcacctgcactgtctctggtggctccatcagcagtggcgattactactggagctggatccgccagcacccagggaagggcctggagtggattgggtacatcttttacagtgggagcacctattacaacccgtccctcaagagtcgagttaccatatcagtagacacgtctaagaaccaattctccctgaagctgaactctgtgactgccgcggacacggccgtgtatcactgtgcgagaggtcgacagctaataaactggttcgacccctggggccaaggaaccctggtcaccgtctcctca

SEQ ID NO: 7168 - DNA, 396 bp, synthetic construct
  source 1..396: mol_type = other DNA
caggtgcagctggtggagtctggggctgaggtgaagaagcctggggcctcagtgacggtttcctgcaaggcacctgcatacaccttcaccagctactatatacactgggtgcgacaggcccctggacaagggcttgagtggatgggaataatcaaccctagtggtggtagcacaacctacgcccagaagttccagggcagagtcaccatgaccagggacacgtccacgagcacagtctacatggagctgagcagcctgagatctgaggacacggccgtgtatttctgtgcgagaggagggcggggatttttggagggggtattatcggatgagaattactaccactactacggtatggacgcctggggccaagggaccacggtcaccgtctcctca

SEQ ID NO: 7169 - DNA, 369 bp, synthetic construct
  source 1..369: mol_type = other DNA
gaggtgcagctgttggagtccggctcaggactggtgaagccttcacagaccctgtccctcacctgcgctgtctctggtggctccatcagcagtgatgattattcctggaactggatccggcagccaccagggaagggcctggagtggattgggtacatctatcatagtgagagtacctactacaacccgtccctcgagagtcgagtcaccatatcagtcgacaggtccaagaaccagttctccctgaacctcagctctgtgaccgccgcggacacggccgtgtattactgtgccggagaagtcgttaggggtaacggacggaatgcttttcatatctggggccaagggacaccggtcaccgtctcctca

SEQ ID NO: 7170 - DNA, 378 bp, synthetic construct
  source 1..378: mol_type = other DNA
gaggtgcagctgttggagtctgggggaggcgtggtccagcctgggaggtccctgagactctcctgtgcagcctccggattcaccttcagtggctatgctatgcactgggtccgccaggctccaggcaagggcctagagtgggtggcagttatatcatatgatggaattaataaatactacgcagactccgtgaagggccgattcaccatctccagagacaattccatgaccacgctgtttctgcaaatgaacagcctcagagctgaggacacggctgtgtattactgtgcgagagattcccaccctcctgttcattacttttggagtggttattattgcgactactggggccagggaaccctggtcaccgtctcctca

SEQ ID NO: 7171 - DNA, 366 bp, synthetic construct
  source 1..366: mol_type = other DNA
caggtgcagctggtggagtctgggggaggcttggtacagcctggggggtccctaagactctcctgtgcagcctctggattcacctttagcagctatgccatgagctgggtccgccaggctccagggaaggggctggagtgggtctcaggtgttagtggtagtggtgatggcacattctacgcagactccgtgaagggccggttcaccatctccagagacaattccaagaacacgctgtatctgcaaatgaacagcctgagagccgaggacacggccgtatattactgtgggaaagatagtaaccttattactatgatagtagttgatgagtactggggccagggaaccctggtcaccgtctcctca

SEQ ID NO: 7172 - DNA, 369 bp, synthetic construct
  source 1..369: mol_type = other DNA
gaggtgcagctggtggagtctgggggaggcgtggtccagcctgggaggtccctgagactctcctgtgcagcctctggattcaccttcaataactttgcttttcactgggtccgccaggctccaggcaaggggctagagtgggtggcagttatatcatatgatggaagtaataaatactacgcagactccgtgaagggccgattcaccatctccagagacaattccaagaacacgctgtatctgcaaatgaacagcctgagagctgaggacacggctgtgtattactgtgcgagcgctatggtggctcattactactactactacggtatggacgtctggggccaagggaccacggtcaccgtctcctca

SEQ ID NO: 7173 - DNA, 366 bp, synthetic construct
  source 1..366: mol_type = other DNA
gaggtgcagctgttggagtcgggcccaggactggtgaagccttcacagaccctgtccctcacctgcactgtctctggtggctccatcagcagtgatatttactactggagctggatccgccagcacccagggaagggcctggagtggattgggtacatctattacagtgggagcacctactacaacccgtccctcaagagtcgagttaccatatcagtagacacgtctaagaaccagttctccctgaagctgagctctgtgactgccgcggacacggccgtgtattactgtgcgagaaattcgagattcttagggacaaactactttgactactggggccagggaaccctggtcaccgtctcctca

SEQ ID NO: 7174 - DNA, 381 bp, synthetic construct
  source 1..381: mol_type = other DNA
gaggtgcagctgttggagtcgggcccaggactggtgaagccttcacagaccctgtccctcacctgcactgtctctggtgactccatcagtagtggtggttactactggagctggatccgccagcacccagggaagggcctggagtggattgggtacatctattacagtgggagcacctactacaacccgtccctcaagagtcgagttaccatgtcattagacacgtctaagaaccagttctccctgaagctgagctctgtgactgccgcggacacggccgtgtattactgtgcgagagattggggtcgcgggtctagcagctcgccggaacatgatgcttttgatatctggggccaagggaccacggtcaccgtctcctca

SEQ ID NO: 7175 - DNA, 357 bp, synthetic construct
  source 1..357: mol_type = other DNA
caggtgcagctggtgcagtctgggggaggcgtggtccagcctgggaggtccctgagactctcctgtgtagcgtctggattcaccttcagtagctatggcatgcactgggtccgccaggctccaggcaaggggctggagtgggtggcacttatatggtatgatggaagtaataaatattatgcagactccgtgaagggccgattcaccatctccagagacaattccaagaacacgctgtatctgcaaatgaacagcctgagagccgaggacacggctgtgtattactgtgcgagagcggtgcctggtactaactactttgactactggggccagggaaccctggtcaccgtctcctca

SEQ ID NO: 7176 - DNA, 381 bp, synthetic construct
  source 1..381: mol_type = other DNA
gaggtgcagctgttggagtcgggcccaggactggtgaagccttcacagaccctgtccctcacctgcactgtctctggtggctccatcagcagtggtggttactactggagctggatccgccagcacccagggaagggcctggagtggattgggtacatctattacagtgggagcacctactacaacccgtccctcaagagtcgagttaccatatcagtagacacgtctaagaaccagttctccctgaagctgagctctgtgactgccgcggacacggccgtttattattgtgcgaggacgtattactatgatagcagtggtaattactaccagtactactttgactactggggccagggaaccctggtcaccgtctcctca

SEQ ID NO: 7177 - DNA, 396 bp, synthetic construct
  source 1..396: mol_type = other DNA
caggtccagctggtgcagtctggggctgcggtgaagaagcctggggcctcagtgaaagtttcctgtcaggcatctggatacaccttcactaattactatattcactgggtgcgacaggcccctggacaagggcttgagtggatgggattaatcaatcctagtggtgggagctcaaactacgcacagaagttccagggcagagtcaccttgaccaggggcacggccacgaacacagtttacatggagctgagcagcctgagatccgaggacatggccgtgtattattgtgcgagaggagggcggggatttttggagaaaattttatcggatgagggttactacgactatttcggtatggacgtctggggccaagggaccacggtcaccgtctcctca

SEQ ID NO: 7178 - DNA, 360 bp, synthetic construct
  source 1..360: mol_type = other DNA
aggtccagctggtggcagtctgggggaggcttggtacagcctggggggcccctgcgactctcctgtgcagcctctggattcacctttagcagctatgccttgagctgggtccgccaggctccagggaaggggctggagtgcgtctcagctcttagtgctagtggtgatgccccttactacgcagactccgtgaagggccggttcaccatctccagagacaattcccggaacacgctgtatctgcaaatgaacagcctgagagccgaggacacggccgtatattactgtgcgaaacaagctggttcaccccccgactactttgactactggggccagggaaccctggtcaccgtctcctca

SEQ ID NO: 7179 - DNA, 351 bp, synthetic construct
  source 1..351: mol_type = other DNA
caggtgcagctggtggagtctggaggaggcttgatccagcctggggggtccctgagactctcctgtgcagcctctgaattcatcgtcagtagcaactacatgagttgggtccgccaggctccagggaaggggctggagtgggtctcagttatttatcccggtggtagcacattctacgcagactccgtgaagggccgattcaccatctccagagacagttccaagaacacactgtttcttcaaatgaacagcctgagagccgaggacacggccgtgtactactgtgcgagggattacggtgacttctactttgacttctggggccagggaaccctggtcaccgtctcctca

SEQ ID NO: 7180 - DNA, 375 bp, synthetic construct
  source 1..375: mol_type = other DNA
gaggtgcagctggtggagtctgggggaggcttgatacagcctggggggtccctgagactctcctgtgcagcctctggattcacctttagcagctttgccatgagctgggtccgccaggctccagggaaggggctggagtgggtctcagctattagtaatagtggtggtagcacatactacgcagactccgtgaagggccgcttcaccatctccagagacaattccaagaacacgctgtatctgcaaatgaacagcctgagagccgaggacacggccctttattactgtgcgaaacaagcgtatagcagtggctggtacgccgccgggttagtatttgactactggggccagggaaccctggtcaccgtctcctca

SEQ ID NO: 7181 - DNA, 366 bp, synthetic construct
  source 1..366: mol_type = other DNA
gaggtgcagctgttggagtcgggcccaggactggtgaagccttcggagaccctgtccctcacctgcactgtctctggcggctccatcagtaattactactggagctggatccggcagcccccagggaagggactggagtggattgggtatatcttttacggtggcagcaccaactacaacccctctctcaggagtcgactcaccatatcagtagacacgtccaagaaccagttctccctgaggctgagctctgtgaccgcggcggacacggccgtttattactgtgcgagagatctcgggtatagcagtggctggcctgatgcttttgatatctggggccaagggaccacggtcaccgtctcctca

SEQ ID NO: 7182 - DNA, 360 bp, synthetic construct
  source 1..360: mol_type = other DNA
gaggtgcagctgttggagtctgggggaggcgtggtccagcctgggaggtccctgagactctcctgtgcagcctctggattcaccttcagtagctatgctatgcactgggtccgccaggctccaggcaaggggctggagtgggtggcagttatatcatctgatggaagcatgaaattctacgcagactccgtgaagggccgattcaccatctccagagacaattccaagaacacgctgtttctgcaaatgaacagcctcagacctgaggacacggctgtatattactgtgcgagagatgccgaaaacctggttaccgagtttgactactggggccagggaaccctggtcaccgtctcctca

SEQ ID NO: 7183 - DNA, 360 bp, synthetic construct
  source 1..360: mol_type = other DNA
caggtgcagctggtgcagtctggggctgaggtgaagaagcctggggcctcagtgaaggtttcctgcaaggcatctggatacaccttcaccacttactatatgcactgggtgcgactggcccctggacaagggcttgagtggatgggaataatcaaccctagtggtggtggcacaagctacgcacagaagttccagggcagagtcaccatgaccagggacacgtccacgagcacagtctacatggagctgagcagcctgagatctgaggacacggccgtgtattattgtgtgagagaaggttgtagtagtaccagctgctttgactactggggccagggaaccctggtcaccgtctcctca

SEQ ID NO: 7184 - DNA, 390 bp, synthetic construct
  source 1..390: mol_type = other DNA
gaggtgcagctggtggagtctgggggaggcgtggtccagcctgggaggtccctgagactctcctgtgcagcgtctggattcaccttcagtagctatggcatgcactgggtccgccaggctccaggcaaggggctggagtgggtggcagttatatggtatgatggaagtaataaatactatgcagactccgtgaagggccgattcaccatctccagagacaattccaagaacacgctgtatctgcaaatgaacagcctgagagccgaggacacggctgtgtattactgtgcgagagacaaaatcatttgggagagtggttatcacaaaaattactactactactactacatggacgtctggggcaaagggaccacggtcaccgtctcctca

SEQ ID NO: 7185 - protein, 122 aa, synthetic construct
QVQLVQSGAEVKKPGESLKISCKGSGYSFTSYWIGWVRQMPGKGLEWMGIIYPGDSDTRYSPSFQGQVTISADKSISTAYLQWSSLKASDTAMYYCARGEGYGDYADAFDIWGQGTMVTVSS

SEQ ID NO: 7186 - protein, 120 aa, synthetic construct
QVQLVQSGAEVKKPGESLKISCKISGYSFTTYWIGWVRQMPGKGLEWMGIIYPGDSDTRYSPSFQGQVTISADKSMTTAYLQWSSLKASDTAMYFCARRIRTYPPCFDYWGQGTLVTVSS

SEQ ID NO: 7187 - protein, 122 aa, synthetic construct
QVQLQQSGPGLVKPSETLSLTCSVSGASVSGEGNYWTWIRQPPGKRLESIAYFYSTGKTNYNPSLKSRVTISVDKSKNLFSLRLDSVTAADTALYYCARADRRLPNDAFDVWGQGTTVTVSS

SEQ ID NO: 7188 - protein, 127 aa, synthetic construct
QVQLVQSGAEVKKPGSSVKVSCKASGGTFSSYGISWVRQVPGQGLEWMGRVIPFLRILDYAPKFQGRLTIAVDTSTSTAYLELSSLRSEDTAVYYCAEHYHESRFGGGISDDAFNIWGQGTMVTVSS

SEQ ID NO: 7189 - protein, 118 aa, synthetic construct
QVQLLESGGGLVQPGGSLRLSCAISGLIISDHYIDWVRQAPGKGLEWVGRSANRVNSYTALYAASVMGRFTISRDDSKNTLFLQMTSLKTDDTAVYHCVVIAGTYGSWGQGTLVTVSS

SEQ ID NO: 7190 - protein, 122 aa, synthetic construct
QVQLQQWGAGLLKPSETLSLTCAFSGGSVNGDYWSWIRQPPGKGLELIGEISHDGTTKYKSALESRVSISLDTSKNQFSLKLSSVTAADTAMYYCARGLSAVVTVSGWFDSWGQGTLVTVSS

SEQ ID NO: 7191 - protein, 122 aa, synthetic construct
EVQLQESGGGLVQPGGSLRLSCAASGFTFSDHFMDWVRQAPGKGLEWVGRTRNKANSYTTEYAASVKGRFTISRDDSKNSLYLQMNSLKTEDTAVYYCARVGAALGGVCDYWGQGTLVTVSS

SEQ ID NO: 7192 - protein, 123 aa, synthetic construct
EVQLVQSGAEVRKPGASVKVSCKTVGYTFPAYSIHWVRQVPGQRLEWLGWINPRYGNTKSSQNLQGRFTMSSDTGATTVFMELRGLTSDDTAVYYCARSGFCDGTSCFSGDYWGQGTLVTVSS

SEQ ID NO: 7193 - protein, 121 aa, synthetic construct
EVQLLESGPGLVKPSETLSLICSISGGSISSHYWSWIRQSPGKGLEWIGNIYHSGSTNYNPSLKSRVSITVDTSRTQFSLKLSSVTAADTAVYYCARGPHERWFKNWFDPWGQGTLVTVSS

SEQ ID NO: 7194 - protein, 118 aa, synthetic construct
EVQLVQSGAEVKKPGASVKVSCKASGYPFTGRYMHWVRQAPGQGLDWMGWINPSSGYTNSAQKFQGRITLTRDTSTTTIFMELNSLRSDDTAIYYCTRDPTAGAGDYWGQGTLVTVSS

SEQ ID NO: 7195 - protein, 125 aa, synthetic construct
EVQLVESGGGLVQPGRSLRLSCAASGFTFEDYAMHWVRQTPGKGPEWVSGISWNGGIMGYAASVEGRFIISRDNAKNSLYLQMMRLRAEDTAFYYCTKAQAPLDSGDFGGGFHIWGPGTTVTVSS

SEQ ID NO: 7196 - protein, 122 aa, synthetic construct
QVPLKESGPALVKPTQTLTLTCTFSGFSLATSGMRVSWIRQPPGKALEWLARIDWEDDKVYSTSLKNRLTISKATSKNQVVLTMTDMDPVDTATYYCARVGDRFGYQYMDVWGNGTTVTVSS

SEQ ID NO: 7197 - protein, 121 aa, synthetic construct
EVQLVETGGGLIQPGGSLRLSCAASGITVSSNYMTWVRRAPGKGLEWVSVLYSGGSTYYADSVKGRFTISRDNSKNTLFLQMNSLKAEDTADYYCARGDGGGDYPYGMDVWGQGTTVTVSS

SEQ ID NO: 7198 - protein, 121 aa, synthetic construct
QVPLVESGGGLVQPGRSLRLSCAASGFTFDDYAMHWVRQAPGKGLEWVSGISWNGGSIAYADSVKGRFTISRDNAKNSLYLQMNSLRPEDTAFYYCGKGSTSSYYGYFDPWGHGTLVTVSS

SEQ ID NO: 7199 - protein, 127 aa, synthetic construct
EVQLLESGGGLVQPGRSLRLSCAASGFTFDDYAMHWVRQVPGKGLEWVSGVTWNSGTIDYADSVKGRFFISRDNAKNSLYLQMNSLRAEDTALYYCAKDGGGRLLYFEMEHYYMDVWGKGTTVTVSS

SEQ ID NO: 7200 - protein, 127 aa, synthetic construct
EVQLVESGGGFVKPGGSLRLSCAASGFTFNYAWMTWVRQAPGGGLEWVGRVKSHIDGGTTDYAAPVKGRFVISRDDSKNTLYLEMNSLKTEDTAVYYCVTDLSRFLSSRETDAFDIWGQGTTVTVSS

SEQ ID NO: 7201 - protein, 124 aa, synthetic construct
EVQLVESGGRAVQPGGSLRLSCGASGFTFRTYDFYWVRQTPGKGLEWVAVVSSDASSKFYADSVKGRFTISRDNSKNTLFLQMSSLIPEDSAVYYCAREKRVRTILGHYGFDVWGQGTTVTVSS

SEQ ID NO: 7202 - protein, 123 aa, synthetic construct
EVQLVQSGGGVVQPGRSLRLSCVASGFTFGNFAVHWVRQTPGKGLEWVAATSHDGSEKNYADSVKGRFTISRDNSKNTLYLQMDSLRPEDTALYYCARGGHIVMVTAGYFDFWGQGTPVTVSS

SEQ ID NO: 7203 - protein, 129 aa, synthetic construct
EVQLVESGGGVVQPGRSLSLSCAASGFTFRHFALHWVRQTPGKGLEWVAVISYDGNEKYYADSVKGRFTISRDNSKNTVYLQMNSLRVEDTAVYFCAKDHLTARYYDFRSVSFNGDAYWGQGTLVTVSS

SEQ ID NO: 7204 - protein, 122 aa, synthetic construct
EVQLVESGPGVVRPSETLSLTCAVSGYSISSGYSWGWVRLPPGKGLQWIGSVSHDGSTYHNPSLKSRVTISADTSKNQFSLMLSSVTAADTAIYYCAREGGSFFRDGDFEHWGQGTLVTVSS

SEQ ID NO: 7205 - protein, 127 aa, synthetic construct
EVQLKESGGGVVQPGGSLRLSCGASGFTLSSFSMNWVRQAPGKGLEWVSYISSGSTIIHYADSMRGRFTISRDNAKNSLFLQLNSLRVEDTAVYYCARHLSPTNNDFLTGPDAFDLWGQGTTVTVSS

SEQ ID NO: 7206 - protein, 122 aa, synthetic construct
QVQLQQSGGGFVKPGGSLRLSCATSGFSFNHAWMSWVRQAPGKGLEWVGRIKTINDGGTTDYAAPVKGRFTISRDDSKSTLSLQMNSLKTEDTAVYFCSTASDYGDHSPHYWGQGTLVTVSS

SEQ ID NO: 7207 - protein, 124 aa, synthetic construct
EVQLVESGGGLVQPGGSLRLSCAASGFRFSNYDMHWVRQAIGKGLEWLSVIGTDGDTYYPDSVKGRFTVSRDNGKNSLYLQMNNLGAGDTAVYYCVRGAWSSDSYLPRGFFDYWGQGALVTVSS

SEQ ID NO: 7208 - protein, 128 aa, synthetic construct
EVQLVESGGGLVQPGGSLRLSCVASGFTFSSDDMHWVRQPAGKGLEWVSAIGTSGDSYYTDSVKGRFTISRENAKNSLFLQMNNLRAGDTAVYYCARGTQQQLVLHGNVNYFYYMDVWGKGTTVTVSS

SEQ ID NO: 7209 - protein, 119 aa, synthetic construct
QVQLKQSGGGLIQPGGSLRLSCAASGLIVSSNYMSWVRQAPGKGLELVSVIYAGGRTDYADSVKGRFTISRDDSKNTLHLQMNSLRVEDTAVYYCARGDGGYYSGIDYWGQGTLVTVSS

SEQ ID NO: 7210 - protein, 123 aa, synthetic construct
EVQLLESGPGLVKPSETLSLTCTVSGASISTYYWGWIRQPPGKGLEWIGYIYYSGSANLNPSLKSRVTISVDTSKNQLSLKLNSVTAADTAIYYCARLPDSDYHGYAYYFDYWGQGTLVTVSS

SEQ ID NO: 7211 - protein, 126 aa, synthetic construct
EVQLVESGGDLVQPGGSLRLSCVASGFTFSNYEMNWVRQGPGKGLEWISYISTSGSTYYYADSVKGRVTISRDNARNSLYLEMHSLRVEDTGLYYCLTHPQPQYVRPTPVVWFDPWGQGTLVTVSQ

SEQ ID NO: 7212 - protein, 128 aa, synthetic construct
QVQLVQSGAEVKKPGSSVKVSCRASGGTFSNFAINWVRQAPGQGPEWMGRVIPVLDRPIYAQQFQGRVTIIADTSTNTAYMEVSSLRSEDTAVYYCARDVKFDYSTSSIEESIAFDIWGQGTTVTVSS

SEQ ID NO: 7213 - protein, 130 aa, synthetic construct
EVQLVESGGGLVQPGGSLRLSCAASGITFNNDDIHWVRQGPGKGLEWVSAIGSSGDTYYADSVKGRFTISRENARKSLYLQMNNLRAGDTGIYYCARGDIEVRPASTTHKTSYFYYMDVWGKGTTVTVSS

SEQ ID NO: 7214 - protein, 122 aa, synthetic construct
QVQLVQSGGGLVQPGGSLRLSCAASGFTFSRFDMHWFRQGTGKGLEWVSAIGTSGDTYYGDSVKGRFTISRENAKNSLNLQMNSLRAEDTAIYYCARATPHSSGYWDWFDPWGQGTLVTVSS

SEQ ID NO: 7215 - protein, 123 aa, synthetic construct
EVQLVESGGGVVQPGRSLRLSCAASGFTFGNYAMHWVRQAPDKGLEWVAVVSYDGSNEFYADSVKGRFSISRDNSKNTLHLQMNSLKAEDTAEYFCVRPHLPDYFGSGSFHYWGQGVLVTVSS

SEQ ID NO: 7216 - protein, 125 aa, synthetic construct
EVQLVQSGPAVKKPGSSVKVSCKASGGAFSIHGITWVRQAPGQGLEWLGGIIPMFGTANYPQNFQGRVTITAEESTSTVYMELNSLRCEDTAMYYCARDGRYCNSTACLNFFDLWGQGTLVTVSS

SEQ ID NO: 7217 - protein, 120 aa, synthetic construct
EVQLLESAPGLVKPSGTLSLTCAVSGDSISSGYWWSWVRQPPLKGLEWIGDIYHSGNTVYNPSLKSRVTISVDKSKNHFSLSLKSVTAADTAVYYCARSIGSRPRWFDPWGQGTLVTVSS

SEQ ID NO: 7218 - protein, 122 aa, synthetic construct
EVQLLESGTEVKKPGASVKVSCKALGYTFTNNYIHWVRQAPGQGLEWMGIINPSGGATTYAQKFQGRVTLTSDTSTSTVYLELTSLTSEDTAVYYCARDSEYIPAAGSFDYWGQGTLVTVSS

SEQ ID NO: 7219 - protein, 125 aa, synthetic construct
EVQLVESGPEVKKPGESLTISCKASGYSFISYWITWVRQMPGKGLEWMGNIDPSDSYTNYSPAFQGHVTIAADKGISTAYLQWRSLKASDTAMYYCARRIMITSGGKEIDAFDIWGQGTTVTVSS

SEQ ID NO: 7220 - protein, 130 aa, synthetic construct
EVQLVQSGAEVKKPGASVKVSCKTSGYAFINYGISWVRQAPGQGLEWMGWISPYDGHTNYAQKIQGRVTMATDTSASTAYMDLRSLRSDDTAVYYCVRDYYGALTSPNANSETLGTMDYWGQGTLVTVSS

SEQ ID NO: 7221 - protein, 122 aa, synthetic construct
EVQLVESGGGVVQPGKSLRLSCVASGFTFSRHGMHWVRQAPGKGLEWVALIYYDGSSKYYADSVKGRFTISRENSKNTLYLQMNSLRVEDTALYYCARDGANGYDPLYLNHWGQGTLVTVSS

SEQ ID NO: 7222 - protein, 117 aa, synthetic construct
QVQLVESGPGLVKPSETLSLTCTVSDDSISSSNSYWAWIRQPPGKGLEWIGSIFYSGSTYYNPSLKSRVTISVDTSKNQFSLQLTSVTATDTAVYYCARELGFSDSWGQGTLVTVSS

SEQ ID NO: 7223 - protein, 121 aa, synthetic construct
EVQLLESGPGLVKPSQTLSLTCTVSGDSISRGGYYWSWIRQHPGRGLEWIGFIYYSGSTYYNPSLKSRVTISVDTSKNQFSLKLSSLTAADTAVYYCARDFGGNAQYFAFWGPGTLVTVSS

SEQ ID NO: 7224 - protein, 127 aa, synthetic construct
EVQLVESGGGVVQPGRSLRLSCAASGFTFRRYGMHWVRQAPGKGLEWVAVILYDGSNKDYADSVKGRFTISRDNSKNTLYLQMNSLRAEDTAVYYCAKSQGTYCSGGNCYSNYFDYWGQGTLVTVSS

SEQ ID NO: 7225 - protein, 116 aa, synthetic construct
EVQLVESGPGLVKPSGTLSLTCAVSGGSISGSNWWAWVRQSPGKGLEWIGEIFHSGSTVYNPSLKSRVTMSLDKSKSQFSLNLITRSKMKWVTFISLLFLFLASSRAEVQLFTVSS

SEQ ID NO: 7226 - protein, 130 aa, synthetic construct
PGARCCSLGDVWSSWEVPATLLCSSGFTFSNYAMHWVRQAPGKGLEWVALISYDGSNNYYADSVKGRFTISRDNSKNTLYLQMNSLRAEDTAVYYCARGGDCSGGGCPYPYYYNGIDDVWGQGTTVTVSS

SEQ ID NO: 7227 - protein, 124 aa, synthetic construct
QVQLQQSGAEVKEPGSSVKVSCMASGGTFSSSPISWIRQAPGQGLEWMGTIIPILGVPNYAQQFQARLTLTADKSTSTAYMELSSLRSEDTASYYCARESGYSAPGSVTYFDLWGRGTLVTVSS

SEQ ID NO: 7228 - protein, 123 aa, synthetic construct
EVQLVQSGGGVVQPGRSLRLSCAASGFTFSNYAFYWVRQTPGKGLEWVALMSDDGAYKDYADSVKGRFTISRDNSKNTLYLQMNGLKSEDTAVYFCARDLPSSSWSSTAFDYWGQGALVTVSS

SEQ ID NO: 7229 - protein, 123 aa, synthetic construct
QVQLVQSGPEVKKPGTSVKVPCKASGFNFDLSAVQWVRQARGQRLEWIGWIAVGSGKTDYAQKFHERVTITRDMSINTAYLELSSLRSEDTAVYYCAAPHCNRTNCHDGFDLWGQGTTVTVSS

SEQ ID NO: 7230 - protein, 124 aa, synthetic construct
EVQLVESGGGVVQPGRSLRLSCAASGFPFSTYPMHWVRQAPGRGLEWVAVISYDGAHKFYADSVKGRFTVSRDNSKNTLYLQLNSLRPEDTAVYSCASRSPRVPATATNAFDIWGQGTTVTVSS

SEQ ID NO: 7231 - protein, 126 aa, synthetic construct
QVQLVESGGSLVKPGGSLRLSCAASGFPFSNAWMTWVRQAPGKGLEWIGRIKNGPDGGTTDYAAPVRGRFTISRDDSKNTLYLQMNSLKSEDTGVYFCTTMSREYYDTDFYAKDVWGQGTTVTVSS

SEQ ID NO: 7232 - protein, 122 aa, synthetic construct
EVQLVESGGGLVQPGRSLRLSCAASGFTFEDYGMHWVRQAPGKGLEWVSGTAWNSATIGYADSVKGRFFISRDNAKSSLYLQMISLRAEDTALYYCVKVFSRDWSGYAFDMWGQGTTVTVSS

SEQ ID NO: 7233 - protein, 120 aa, synthetic construct
EVQLLESGGGLVQPGGSLRLSCAATGFPFITYEMNWVRQAPGKGLEWVSHISSGGTTTYYADSVKGRFTISRDNDENSLVLQMNSLRAEDTAVYYCARVLRYSSAWVDLWGQGTLVTVSS

SEQ ID NO: 7234 - protein, 117 aa, synthetic construct
EVQLLETGGGLIQPGGSLRLSCAASEIIVSRNYMTWVRQAPGKGLDWVSVIYPGGSTFYADSVRGRFTISRDDSKNTLYLQMISLRAEDTAVYYCARQENNDAFDIWGQGTTVTVSS

SEQ ID NO: 7235 - protein, 116 aa, synthetic construct
EVQLLESGGGLVQPGGSLRLSCAASGFIFTNYWISWVRQAPGKGLEWVATVKQDGTEKYYVDSVKGRFTISRDNAKNSVFLQMNSLRAEDTAVYYCARELGILDWWGQGTLVTVSS

SEQ ID NO: 7236 - protein, 122 aa, synthetic construct
QVQLVQSGGGLVQPGGSLRLSCAASGFTFSTSDMHWVRQVTGKHLEWVSGVGTSGDTYYSDSVKGRFTISRENAKNSLYLQMNNLRAGDTAVYYCARGETTMALRWYAFDIWGQGTTVTVSS

SEQ ID NO: 7237 - protein, 126 aa, synthetic construct
QVQLVQSGAEVKKPGASVKLSCKASGYTFTSYFIHWVRQAPGQGLEWMGIINPGDDSTTYSQKFQGRVTVTSDTSTSTVYMELSSLRSEDTAVYYCARDFLPATASPYYYYYMDVWGKGTTVTVSS

SEQ ID NO: 7238 - protein, 128 aa, synthetic construct
QVTLKECGPALVKPTQTLTLTCTFSGFSLNTGGICVSWLRQPPGKALEWLARIDWDYEKHYSASLTTRLTISTDTSKNQVVLTMTNMDPVDTATYYCARFKYFYDRNNYYFGSGFDYWGQGALVTVSS

SEQ ID NO: 7239 - protein, 127 aa, synthetic construct
EVQLVQSGAEVKKPGSSVKVSCKASGGTARTYAISWVRQAPGQGLEWMGGIIPKYDTTNYAQKFQGRVTITADKSTSTAYMELSSLTSEDTAVYYCAHSPGYSSGWYRAGISWFDPWGQGTLVTVSS

SEQ ID NO: 7240 - protein, 119 aa, synthetic construct
QVQLLESGPGLVKPSGTLSLTCAVSGGSISSSNWWTWVRQPPGKGLEWIGEIYHRGTTDYNPSLKSRVTISLDKSKNYFSLNLTSVTAADTAVYYCARAPAGDFRQLFWGRGTLVTVSS

SEQ ID NO: 7241 - protein, 123 aa, synthetic construct
QVQLAQSGAEVKKPGESLKISCKGSGYSFDTKWIAWVRQMPGKGPEWLGTIYPGDSDTRYSPSFQGQVTISADKSISTAYLQWSSLKASDTAIYYCARRADFSSSWTDYFDYWGQGALVTVSS

SEQ ID NO: 7242 - protein, 120 aa, synthetic construct
QVTLKESGPALVKPTQTLTLTCTFSGFSLTTSGMSVTWIRQPPGKALEWLALVDWDDAKYYSTSLTTRLTISKDTSKNQVVLTMTNMDPVDTGTYYCARIDRRRNCMDVWGQGTTVTVSS

SEQ ID NO: 7243 - protein, 119 aa, synthetic construct
EVQLVESGGGLIQPGGSLRLSCAASGVTVSRNYMSWVRQAPGKGLEWVSIIYSGGSAYYADSVKGRFTISRDDSRNTLYLQMKSLRAEDTAVYYCVRRIVGGNAGMDVWGQGTTVTVSS

SEQ ID NO: 7244 - protein, 123 aa, synthetic construct
EVQLLESGPGLVKPSQTLSLTCTVSGGSISGAPYYWTWIRQHPGRGLEWMAHTEYSGGTYYNPSLKSLLNISIDRSKNQFSLKVTSVTAADTAVYYCARIHDYGGHISAFDMWGQGTTVTVSS

SEQ ID NO: 7245 - protein, 124 aa, synthetic construct
QVQLQQSGAEVKKPGSSVKVSCKASGGTFSSYGLTWVRQAPGQGLEFMGRILPLIGVPDYAQSFQGRVTITADTSTGTAYVEVNSLRSEDTALYYCARERGYSGYGSAVYFDIWGQGTLVTVSS

SEQ ID NO: 7246 - protein, 125 aa, synthetic construct
QVQLQESGPGLVEPSQTLSLTCTVSGGSIGSNSFYLTWIRQSAGKGLEWLGRIYASGGTSYNPSLQSRVTMSLDTSKNQMFLRLTSVTAADTAVYYCARGGGYDELLVFGAFDIWGQGTTVTVSS

SEQ ID NO: 7247 - protein, 126 aa, synthetic construct
QVQLVQSGAEVKKPGASAKVSCRASGYTFTDYYIHWLRQAPGQGFEWMGWLNPQTGDTNYAQKFQGRVSMTGDTSISTAYMELRRLTSDDTAFYYCARGGYCSAYSCFHGAWFAPWGQGSLVTVSS

SEQ ID NO: 7248 - protein, 117 aa, synthetic construct
EVQLLETGGGLIQPGGSLRLSCAASEIIVSWNYMTWIRQAPGKGLEWVSVMYPGGSTFYADSVRGRFTISRDHSKNILYLQMINLRVEDTAVYYCARQENNDAFDIWGQGTTVTVSS

SEQ ID NO: 7249 - protein, 116 aa, synthetic construct
EVQLLESGPGLVKPSGTLSLTCAVSGASMNSRNWWAWVRQTPGQGLEWIGEISHSGSTNYNPSLKSRLTILLDKSKSQFSLRLSSVTAADTAVYYCARAQGIFDYWGQGILVTVSS

SEQ ID NO: 7250 - protein, 122 aa, synthetic construct
EVQLVESGAEVRKPGASVKVSCRASGYTFSNHYIHWVRQAPGQGPEWMGIVNPDAGSTTYAQKFQGRLTLTSDTSTSTVFMELSSLRSDDTAVYYCARDFSFIVATTAFEYWGQGTLVTVSS

SEQ ID NO: 7251 - protein, 116 aa, synthetic construct
EVQLLESGPGLVKPSGTLSLTCAVSGDSITSHSWWSWVRQPPGKGLEWIGEVFHSGSTEYSPSLKSRVTISADKSRDQFSLKLKSVTAADTAVYYCARVAGLFDNWGPGTLVTVSS

SEQ ID NO: 7252 - protein, 124 aa, synthetic construct
QVQLVQSGAEMRKPGSSVKVSCQASGGTFSSYGISWVRQAPGQGLEWMGGIIPILGTTSSAHKFEGRVTITADKSTSMAYMELSSLRSEDTALYYCVRDRGYSGYGSNYYFDLWGRGTLVTVSS

SEQ ID NO: 7253 - protein, 121 aa, synthetic construct
EVQLLESGPGLVKPSETLSLTCTVSGDSINSFYWAWIRQPPGKGLEWIGDIYHSGRTNYNPSLKSRVTISVDTSKNNFSLKLSSLTTADTAVYFCARGPKERWFNNWFDPWGQGILVTVSS

SEQ ID NO: 7254 - protein, 124 aa, synthetic construct
QVQLVQSGGGLVQPGGSLRLSCAASGFTFSTSDMHWVRQGRGRGLEWVSAIGTSGDTYYADSVKGRFSVSREDGKNSFYLQMNSLRAGDTAVYYCARGEALGVEPYYYYFMDIWGQGTTVTVSS

SEQ ID NO: 7255 - protein, 123 aa, synthetic construct
QVQLQQSGGGVVQPGRSLRLSCAASGFTFENYDMHWVRQSPGKGLEWVATISSDASIKYYGDSVKGRFTISRDNSKNTLYLQMSSLRAEDTAVYFCAKDTLVDIAVVTLIDYWGQGTLVTVSS

SEQ ID NO: 7256 - protein, 119 aa, synthetic construct
QVQLMESGPTLVKPTQTLTLTCSFSGFSLNTAGVGLAWIRQPPGKALEWLALVYWDGDRRYSPFLKTRVTITKDTSKNQVVLTMTNMDSVDTATYFCAHHSIPTIFTSWGQGILVTVSS

SEQ ID NO: 7257 - protein, 124 aa, synthetic construct
QVQLVQSGGGVVQPGRSLRLSCPVSGFTFRIYAFHWVRQAPGKGLEWVAVISHDGSETYYADSVKGRFTISRDNSKNTLSLQMHSLRADDTAVYYCARATTDYCGGDCYPIDSWGQGTLVTVSS

SEQ ID NO: 7258 - protein, 123 aa, synthetic construct
QVQLVQSGPEVKKPGTSVKVSCKTSGFTFITSAVQWVRQTRGQRLEWMGWIAVGSGNTEYAQKFQERLTITTDMSTSTTYMELSSLRSEDTAVYYCASPHCRGGSCLDGFDIWGQGTTVTVSS

SEQ ID NO: 7259 - protein, 124 aa, synthetic construct
QVQLVQSGGGVVQPGRSLRLSCLASGFTFSRFSMHWVRQAPGKGLEWVTLISFDGSDKYYTDSVKGRFTISRDNSKNTLYLQMNSLRTEDTAVYYCARATTDYCGGDCYPIDNWGRGIPVTVSS

SEQ ID NO: 7260 - protein, 131 aa, synthetic construct
RSTLKESGGGLVQPGRSLRLSCAASGFTFEDYAMHWVRQAPGKGLEWVSGVSWNSGIIGYADSVKGRFIVSRDNAKNSLYLYMSSLRVEDTAFYYCAKLGALSRQYDFRTGENHQYYMDVWGKGTTVTVSS

SEQ ID NO: 7261 - protein, 121 aa, synthetic construct
EVQLLESGGGVVQPGRSLRLSCAASGFSFSDYGMHWVRQAPGKGLEWVAVIWYDGSNRYYLDSVQGRFTISRDNSKNTVYLQMNNLRAEDTAVYYCARLATIPWSYYMDVWGKGTTVTVSS

SEQ ID NO: 7262 - protein, 125 aa, synthetic construct
QVQLVQSGAEVKKPGASVKVSCKASGYTFTSYGISWVRQAPGQGLEWMGWINTFNGDTNYPQKFQGRVTMTTDTSTTTVHMELRSLRSDDTALYYCARVGTDYVWGSSIYFFDYWGQGTLVTVSS

SEQ ID NO: 7263 - protein, 116 aa, synthetic construct
EVQLVESGPGLVKPSGTLSLTCAVSGGSISSRNWWSWVRQSPGKGLEWIGEIFHTGSTAYNPSLKSRVTMSVDKSKNQFSLRLSSVNAADTAVYYCARSAGLLDYWGQGILVTVSS

SEQ ID NO: 7264 - protein, 128 aa, synthetic construct
EVQLLESGGGLVQPGGSLRLSCAASGFTFSNSDMHWVRQTTGNSLEWVSTIGTAGDTYYPDSVKGRFTISRENAKNSLSLQMNSLRAGDSAVYYCARGEQRMMISGVVPRYYYYMDVWGKGTTVTVSS

SEQ ID NO: 7265 - protein, 124 aa, synthetic construct
QVQLVQSGAEVKKPGASVKVSCKASGYRFTSYGISWVRQAPGQGLEWMGWISVYNGDTNYAQKVQGRVTMTTDTSTNTAYMQLRNLRSDDTAVYYCARDTIYMVRGVLDAFDIWGQGTTVTVSS

SEQ ID NO: 7266 - protein, 126 aa, synthetic construct
EVQLVQSGAEVKKPGSSVKVSCKASGGTFSSYTFSWVRQAPGQGLEWMGRIFPILGIPNYAQKFQDRVTISADRSTSTAYMELSSLRSEDTAVYFCARDRAAADTNTLPTYYFDYWGQGTLVTVSS

SEQ ID NO: 7267 - protein, 119 aa, synthetic construct
QVTLKESGPALVKPKQTLTLTCTFSGFSFSTSGVGVAWIRQPPGKALEWLALIYWDGDKRYSPSLKSRLTITRDTSKNQVVLTMTNMDPVDTATYYCAHHDIPTIFSVWGTGTTVTVSS

SEQ ID NO: 7268 - protein, 127 aa, synthetic construct
EVQLVESGGGLVQPGGSLRLSCAASGFTFSTYDMHWVRQVTGKGLEWVSAIGTGGHTYYPDSVKGRFTISRENAKSSLYLQMNSLRAGDTAVYYCARGLHSVAAGGTIRYYYYMDVWGKGTTVTVSS

SEQ ID NO: 7269 - protein, 117 aa, synthetic construct
EVQLLESGAQVKKPGESLKISCKGSGYSFISNWIGWVRQMPGKGLEWMGIIYPGDSDTRYSPSFQGQVTMSVDKSISTAYLQWTSLKASDTAMYYCARLEVGGRDYWGQGTLVTVSS

SEQ ID NO: 7270 - protein, 120 aa, synthetic construct
EVQLLESGGGVVQPGRSLRLSCVGSGFSFSSYAMHWVRQAPGKGLEWVAVILDDGSNKFYADSVKGRFTISRDNSKNTLYLQMNSLRAEDTAVYYCARDRGFTVTWFDFWGQGTLVTVSS

SEQ ID NO: 7271 - protein, 121 aa, synthetic construct
EVQLMESGAEVKKPGASVKVSCKASGYTFTGYYMHWVRQAPGQGLEWMGWINPNSGGTNYAQKFQGRVTMTRDTSISTAYMELSRLRSDDTAVYYCARVYTRFSAWWFDPWGQGTLVTVSS

SEQ ID NO: 7272 - protein, 122 aa, synthetic construct
EVQLLESGAEVKKPGASAKISCTASGYTFINYYIHWVRQAPGQGFEWMGLITPDGGSRTYAQKFQGRVTMTSDTSTNTVYMDLSSLRSADTAFYYCARGGIVPAAKENFDFWGQGTLVTVSS

SEQ ID NO: 7273 - protein, 124 aa, synthetic construct
EVQLVESGGGLVQPGGSLRLSCTASGFVFSNDDMHWVRQPLEKGLEWVAGIGTSGDTYYADSVKGRFTISREDAKNSLYLQMNSLRAGETAVYFCTRGISTSSAGYHYYYMDVWGKGTTVTVSS

SEQ ID NO: 7274 - protein, 130 aa, synthetic construct
QVQLQQSGPGLVKPSQTLSLTCTVSGGSLISGGYYWNWIRQRPGKGLEWIGCMYYSVGTHYNPSLKSRVAISVDKFKNQFSLRLTSVTAADTAVYYCARGADHRYDSRWYAHETSKFDSWGQGTLVTVSS

SEQ ID NO: 7275 - protein, 122 aa, synthetic construct
EVQLLESGPGLVKPSETLSLTCSVSGGSVSSGSYYWNWIRQPPGKQLEWIGHVFHSGGTNFNPSLRSRLTILVDTSKNQFSLKLRSVTAADTAIYYCARDQGSGWLDAFEVWGQGTTVTVSS

SEQ ID NO: 7276 - protein, 120 aa, synthetic construct
EVQLVESGPGLVKPSGTLSLTCSVSGGSISSSNWWTWVRQSPEKGLEWPREIYHVGATNDNPSLKSRVTISVDKSKNQFSLKLTSVTAADTAVYYCARTPFGDFYYMDVWGKGTTVTVSS

SEQ ID NO: 7277 - protein, 118 aa, synthetic construct
EVQLVESGGGLIQPGGSLRLSCAASGIIVSYNYMSWVRQAPGKGLDWASDIYPGGSTFYADSLKGRFTISRDSSKNTLYLQMNSLRVDDTAVYYCARDGYGENVFDFWGQGTLVTVSS

SEQ ID NO: 7278 - protein, 120 aa, synthetic construct
EVQLVQSGAEVKKPGESLTISCKASGYSFTTYWIGWVRQMPGKGLEWMGNIYPIDSDTRYNPSFQGQVTISADKSITTAYLHWNSLKASDTAIYFCSRQGSGTYYDFDYWGQGALVTVSS

SEQ ID NO: 7279 - protein, 120 aa, synthetic construct
EVQLLETGGGLMQPGGSLRLSCAASGFTVSDYYMSWVRQAPGKGLEWISVIYSGNNTYYIDSVKGRFTLSRDTSKNTLFLQMNSLRAEDTAVYYCAKGADTWYGGTFDSWGQGTLVTVSS

SEQ ID NO: 7280 - protein, 125 aa, synthetic construct
EAQLVESGGSLVQPGRSLRLSCAASGFTFEDYTMHWVRQAPGKGLEWVSGISWNGGIIGYADSVKGRFYISRDNAQNSLYLQMLRLRPEDTALYYCAKDLYLKEGYNSGGAFDMWGQGTTVTVSS

SEQ ID NO: 7281 - protein, 122 aa, synthetic construct
EVQLVESGAEVKKPGASVKVSCKASGHTFTLHYMHWVRQAPGQGLEWMGIINPDAGSTTYAQKFQGRVSMTRDTSTSTVYLHLSSLRSEDTAVYYCARGALVPDAHDALDIWGQGTTVTVSS

SEQ ID NO: 7282 - protein, 117 aa, synthetic construct
EVQLLETGGGLIQPGGSLRLSCAASEIIVSRNYMTWVRQAPGKGLEWVSVVYPGGSTFYADSVRGRFTISRDHSKNTLYLQVTSLRAEDTAVYYCARQDNNDAFDIWGQGTTVTVSS

SEQ ID NO: 7283 - protein, 122 aa, synthetic construct
EVQLVESGGKLVQPGGSLRLSCAASGFSFGTYDMHWVRQSTGKGLEWVSAIGTSGDTYYADSVKGRFTISREDAKKSLYLQMNSLRAGDTAVYYCVRGTTVTGGLEYYFDYWGQGTLVTVSS

SEQ ID NO: 7284 - protein, 121 aa, synthetic construct
EVQLVESGGGVVQPGRSLRLSCATSGFTFSSYAMHWVRQAPGSGLEWVALISNDGRMKFYTDSVKGRFTASRDNSKNTLYLEMNSLRSEDTAVYYCARDGPMTTVTCFDYWGQGTLVTVSS

SEQ ID NO: 7285 - protein, 118 aa, synthetic construct
QVQLVQSGAEVKKPGESLKISCKTSGYSFISNWIGWVRQMPGKGLEWMGIIWPGDSDTTYSPSFQGQVTISVDKSITTAYLEWGSLKASDTAIYYCVRRGSAWEIDYWGQGTLVTVSS

SEQ ID NO: 7286 - protein, 128 aa, synthetic construct
EVQLLESGGGLVQPGGSLRLSCAASGFPFSSYDMHWVRQATGKGLEWVSATGTSGDTSYLDSVKGRFTISRDDARSSLYLQMNNLRAGDTAVYYCVRGDVVEVPSVPSYYYYYYMDVWGKGTTVTVSS

SEQ ID NO: 7287 - protein, 125 aa, synthetic construct
EVQLLESGAEVKKPGESLKISCQDSGDYFSTYWIGWVRQMPGKGLEWVGIFFPGDSDARYSPSFQGQVTMSADKSISTAYLQWSSLKASDTAMYYCARATYCGGDCSSGGAFDVWGQGTMVTVSS

SEQ ID NO: 7288 - protein, 121 aa, synthetic construct
EVQLLESGPGLVKPSQTLSLTCTVSGASISRSGFYWNWIRQHPGKGLEWIGNIYNSGSTYYNPSLKSRLTISVDTSKNQFSLKLNSVTAADTAVYYCARDYGGNAQYFHYWGQGTLVTVSS

SEQ ID NO: 7289 - protein, 129 aa, synthetic construct
PGAAGGVGPGLVKTSQTLSLTCTVSGGSLSSGGYYWNWIRQHPGKGLEWIGYISYTGSTDYNPSLKSPVTMSVDTSKSQFSLRLSSVTAADSAVYYCARASMTPVTQAGPLGYYYMDVWGKGTTVTVSS

SEQ ID NO: 7290 - protein, 123 aa, synthetic construct
EVQLVESGGGLVQPGGSLRLSCSASGFSFSTYSMHWVRQAPGKGLEYVSDISGDGLITYYADSVKGRFTITRDNSKNTLYLHMSSLRAEDTAVYYCVRDVSVDTSMVTVFEYWGQGTLVTVSS

SEQ ID NO: 7291 - protein, 126 aa, synthetic construct
QVQLVQSGGGLAQPGGSLRLSCAASGFIFSSYDMHWVRQVTGKGLEWVAAIGTAGDTYYEDSVKGRFTISRENAKNSVYLQMNSLRAGDTAMYYCARGDQPITISGVVETYYMDVWGKGTTVTVSS

SEQ ID NO: 7292 - protein, 124 aa, synthetic construct
QVQLVQSGAEVKKPGSSVKVSCKASGGTFSSQTISWVRQAPGQGLEWMGKIFPILGVTNYAERFQGRVTITADKSTSTAYMELSGLRSEDTAEYYCARESGYSASGSVIYFDLWGRGTLVTVSS

SEQ ID NO: 7293 - protein, 129 aa, synthetic construct
EVQLLESGGGVVQPGRSLRLSCAVSGFNFRSYGMHWVRQAPGKGLEWVAAISHDGTNPYYADSVKGRFTISRDNSKDTLYLQMNSLRAEDTAVYHCAKDAVGGYCRGGSCYDFDYFDYWGQGTLVTVSS

SEQ ID NO: 7294 - protein, 123 aa, synthetic construct
EVQLLESGGGLVQPGGSLRLSCSASGFTFSTYSMHWVRQAPGKGLEYVSDISGDGLITYYADSVKGRFTITRDNSKNTLYLQMSSLRAEDTAVYYCVRDVSVDTSMVTVFEYWGQGTLVTVSS

SEQ ID NO: 7295 - protein, 127 aa, synthetic construct
QVQLQQWGTGLLKPSETLSLTCAVYGGSFSGKYWSWIRQPAGKGLEWIGEINDSGTTNYNPSLKSRVTISVDTSKNQFSLKLRSVTAADTADYYCARERVILLSGTSLHYNYYMDVWGKGTTVTVSS

SEQ ID NO: 7296 - protein, 130 aa, synthetic construct
EVQLLESGGGLVKPGGSLRLSCAATGFTFSNAWMNWVRQAPGKGLEWVGRIKSNFDGGTTDYAAPVKGRFSISRDDSKNTLYLQMNSLNTEDTAVYYCTTDVVDDDFRSGYIEHDAFDFWGQGTRVTVSS

SEQ ID NO: 7297 - protein, 122 aa, synthetic construct
QVQLLESGPGLVKPSETLSLTCTVSGVSISDYYWSWIRQPPGKGLEWIGYISYSGSTDYNPSLKSRVTISVDTSKNQVSLKLTSVTAADTAVYYCARELPTGNSYEYYFDYWGQGTLVTVSS

SEQ ID NO: 7298 - protein, 120 aa, synthetic construct
QVQLLESGGGLVQPGGSLRLSCAASGFTFSSYAMSWVRQAPGKGLEWVSSVSGSGANTYYADSVKGRFTISRDNSKNTVSLQMNSLRAEDAAVYYCGKAIIGSNGVGEYWGQGTLVTVSS

SEQ ID NO: 7299 - protein, 127 aa, synthetic construct
EVQLVQSGAEVKKPGESLKISCKGSGYSFTNYWIGWVRQMPGKGLEWMGVIYPGDSDTRYSPSFQGQVTFSADKSISTAYLQWSSLKASDTAIYYCARQTGIVGASRYQYYYYMDVWGKGTTVTVSS

SEQ ID NO: 7300 - protein, 124 aa, synthetic construct
EVQLLESGGGLVQPGGSLRLSCAASGFTFSSYEMNWVRQAPGKGLEWVSYISSSGSTIYYADSVKGRFTISRDNAKNSLYLQMNSLRAEDTAVYYCARAPRTNWNDVWGTFDYWGQGTLVTVSS

SEQ ID NO: 7301 - protein, 122 aa, synthetic construct
QVQLVQSGAEVKKHGASVKVSCKASGNTFTNNYIQWVRQVPGQGVEWMGIINPVGGSRTYAQEFQGRVTLTSDTSTRTLYMEMSSLTSEDTAIYFCARGRIPPDSDGYFDFWGQGTLVTVSS

SEQ ID NO: 7302 - protein, 129 aa, synthetic construct
QVQLVQSGPGLVKPSQTLSLTCTVSGGSIRSVYYYWTWIRQHPGKGLEWIGYIYHNGTTYSNPSLRSRVTMSLDTSKNQFSLKVRSVTAADTAVYFCARLGPSFYDRSGSSRLNYFDSWDQGTPVTVSS

SEQ ID NO: 7303 - protein, 122 aa, synthetic construct
RCTLVQSGGDLVQPGGSLRLSCEASGFTFSSYVMTWVRQAPGKGLEWVSSISGSGGARYSADSLEGRFTISRDNSNNTLYLEMTSLRDEDTAVYYCARFGGSDYRGGWSSYWGQGTLVTVSS

SEQ ID NO: 7304 - protein, 123 aa, synthetic construct
EVQLVESGGGLVQSGGSLRLSCAASGFTFTSDDMHWVRQVIGKGLEWVSGIGTSGDRYYADSVKGRFIISREDARNSLYLQMNSLRAGDTAIYYCARGVAAGNYNLYYYMDVWGKGTTVTVSS

SEQ ID NO: 7305 - protein, 123 aa, synthetic construct
EVQLVESGAEVKKPGSSVKVSCKASGGPFSKYAMNWVRQAPGQRPEWLGRIILVLGITNYAQKFQGRVTMTADKSTNTAYMELGSLTSDDTAVYYCATKDAPTVNSNGGLDFWGQGTLVTVSS

SEQ ID NO: 7306 - protein, 122 aa, synthetic construct
EVQLLESGDEVKKPWASVTVSCKASGYSFTTYYIHWVRQAPGPGLEWMGLITPSDGGASYAQKFQGRVTMTRDTSTSTVYMEMSSLTIEDTAVYYCARGDWNKISYYYMDVWGKGTTVTVSS

SEQ ID NO: 7307 - protein, 120 aa, synthetic construct
RGAAAGVGPRTGEASGTLSLTCAVSGASISSSNWWSWVRQPPGKGLEWIGEIYHVGSTNYNPSLKSRVTISIDKSNNQFSLKLNSVTAADTAVYYCARVVLSDFKEAASWGQGTLVTVSS

SEQ ID NO: 7308 - protein, 121 aa, synthetic construct
QVQLVQSGGGLVQPGGSLRLSCTASGFSFSLFAMNWVRQAPGKGLEWVSSITGSADTTYYADSVKGRFTISRDNSKNTLYLQMNSLSAEDTAVYYCAKGMDGAPGFYFDYWGQGTLVTVSS

SEQ ID NO: 7309 - protein, 117 aa, synthetic construct
QVQLVESGGGLVQPGGSLRLSCAASGLTVSSNYMTWLRQAPGKGLEWVSVMFSGGSTFYADSVKGRFTISRHNSNNTLYLQMSSLGPEDTATYYCARDLPPYGMDVWGQGTTVTVSS

SEQ ID NO: 7310 - protein, 121 aa, synthetic construct
EVQLLESGGGLVKPGGSLRLSCAASGFTFSSYSMNWVRQAPGKGLEWVSSILVTSHVFYADSVKGRFTISRDNVKNSLYLQMNSLRAEDTAVYYCARDSRGLYGSGIPDFWGQGTLVTVSS

SEQ ID NO: 7311 - protein, 116 aa, synthetic construct
RCSCWSPGGGLIQRGGSLRLSCVASGFTVSANYMTWVRQAPGKGLEWVSVIYSDGNTYYANSVKGRFTVSRDNSKNTLFLQMSSLRAEDTAVYFCARVVSDAFDLWGQGTTVTVSS

SEQ ID NO: 7312 - protein, 124 aa, synthetic construct
QVQLQQSGAEVKKPGSSVKVSCRASGGTFSTYTVTWLRQAPGQGLEWMGGIIPIVGIPNYAENFQGRVTITADKSTSTAYMELSSLKSEDTALYYCARGSGYSASGSNTYFDPWGQGTLVTVSS

SEQ ID NO: 7313 - protein, 119 aa, synthetic construct
QVQLQQSGPGLVKPSDTLSLTCAVSGYSIRSDDYWGWIRQTPGKGLEWIGSVYYSGSTHYNPSLKSRVTISVDTSKNQFSLSLTSVTAADTAVYYCARNSSRTPLFDYWGQGTLVTVSS

SEQ ID NO: 7314 - protein, 120 aa, synthetic construct
QVQLVQSGGEVKKPGSSVKVSCKASGGTFGSDSISWVRQAPGQGLEWMGRIIPILGVPNSAQKFQDRVTITADKSTSTAYMELSSLRYDDTAVYFCAREGGTTTEYFRQWGQGTLVTVSS

SEQ ID NO: 7315 - protein, 123 aa, synthetic construct
QVQLVQSGGGVVQPGGSLRLSCAASGFTFSNYDMHWVRQAPGKGLEWVAVISSDGSLRFYADSVKGRFTISRDNSKNTLYLQMNSLRTEDTAVFYCARDPPTSVTSQMLLDFWGQGTLVTVSS

SEQ ID NO: 7316 - protein, 118 aa, synthetic construct
QVQLVQSGGGLVQPGGSLRLSCAASGIIVSSNYMSWVRQAPGKGLEWVSLMYAGGSTFYADSVKGRFTISRDNSKNTLFLQMNSLRVEDTAVYYCARDLAEPYGMDVWGQGTTVTVSS

SEQ ID NO: 7317 - protein, 127 aa, synthetic construct
EVQLVQSGAEVRKPGESLKISCKASGYTFSTYWIGWVRQMPGKGLEWMGIIFPGDSDTRYSPSFQGQVTISADKSISTAYVQWSSLKASDTAMYYCATLKLEGFTPVDYNTLPALYWGQGTLVTVSS

SEQ ID NO: 7318 - protein, 124 aa, synthetic construct
EVQLLESGGGLVQPGRSLRLSCAAAGFIFNDYAMHWVRQVPGKGLEWVSGISWNGVSIGYGDSVKGRFTISRDNAKNSLYLHMNSLRGEDTAVYYCAKDKRLDYSNYGTAPEYWGQGTLVTVSS

SEQ ID NO: 7319 - protein, 117 aa, synthetic construct
QVQLVESGGGLIQPGGSLRLSCAASGLIVSSNYMSWVRQAPGKGLAWVSTLYSGGSTFYADSVRGRFTISRDNSKNTLYLQMNSLTGEDTAVYYCARDALYYGDSNWGQGTLVTVSS

SEQ ID NO: 7320 - protein, 125 aa, synthetic construct
EVQLLESGGGLVQPGRSLRLSCAASGFTFDDYAIHWVRQAPGKGLEWVSGSTWNSGTIGYADSVKGRFIISRDNARNSLYLQMNRLRPEDTAFYYCARDSTILGAKPEEYYFDYWGQGTLVTVSS

SEQ ID NO: 7321 - protein, 130 aa, synthetic construct
RCTLVESGGGVVQPGRSLRLSCAASGFTFSSDDIYWVRQAPGKGLEWVALISSDGSNKYYADSVKGRFTISRDNSKNTLYLQMNSLRGDDTAVYHCARHQESVLPTADRPYRYYYYMDVWGRGTTVTVSS

SEQ ID NO: 7322 - protein, 122 aa, synthetic construct
QVTLKESGPTLVKPTQTLTLTCSFSGFSLSTNGVGVAWIRQPPGKALEWLALIYWDDDKRFSPSLRNRLTITKDTSKNQVVLTLTNIDPVDTATYYCARFKEHLGYNWFDPWGQGTLVTVSS

SEQ ID NO: 7323 - protein, 123 aa, synthetic construct
EVQLVQSGAEVKKPGASVKVSCKASGYTFTGHYMYWVRQAPGQGLEWMGRINPNSGDTHYAQKFQGRVTMTRDASISTAFMELSRLRSDDTAVYYCAVEPYYNILTASYRDCWGQGTLVTVSS

SEQ ID NO: 7324 - protein, 123 aa, synthetic construct
EVQLVESGGGLVQPGRSLRLSCITSGFTFGDHAMNWVRQAPGKGLEWVGFIRTKTYGGTTEYAASVKGRFTISRDDSKSIAYLQMNSLRTEDTAVYYCTGVLGWRGSYREDYWGQGTLVTVSS

SEQ ID NO: 7325 - protein, 121 aa, synthetic construct
QVQLQQSGPGLVKPSETLSLTCTVSGGSISSRSYYWDWIRQSPGRGLEWIGSIYYSGSADYNPSLKSRVTISVDTSKNHFSLKLSSVTAADTAVYYCARRPTTDFYYMDVWGKGTTVTVSS

SEQ ID NO: 7326 - protein, 127 aa, synthetic construct
QVQLLESGGGLVQPGRSLRLTCAASGFTFDDYAMHWVRQAPGKGLEWVSGITWNSGTIGYADSVKGRFIIIRDNAKNSLYLQMNSLRVEDTALYYCVKDSREIKTLMVEEDYYMDVWGKGTTVTVSS

SEQ ID NO: 7327 - protein, 123 aa, synthetic construct
EVQLVESGGGVVQPGRSLRLSCAASGFTFINYGMHWVRQAPGKGLEWVAAISYDGSDEYYADSVKGRFTISRDDSKNTVYLQMNSLRAEDTAVYYCAKVTASHYYYYYGMDVWGQGTTVTVSS

SEQ ID NO: 7328 - protein, 125 aa, synthetic construct
QVQLVQSGAEVKKPGSSVKVSCKASGGTFSSYPISWVRQAPGQGLEWMGRIIPPLGISDYAQKFQGRVTITADKSTSTAYMELSSLTSEDTAVYYCARDRGYSSVSGSNYYMDVWGKGTTVTVSS

SEQ ID NO: 7329 - protein, 124 aa, synthetic construct
QVQLVQSGAEVKKPGSSVKVSCKASGGTFSSNPFSWVRQAPGQGLEWMGRIIPILGIPNYAQKFQGRVTFTADKSTSTAYMELSSLRSEDTAVYYCARDAGYSGSGSAYYFDYWGQGTLVTVSS

SEQ ID NO: 7330 - protein, 123 aa, synthetic construct
QVQLVQSGPEVKKPGTSVKVSCKASGFTFITSAVQWVRQARGQRLEWIGWIAVGRGNTDYAQKFQERVTITRDMSTSTAYMELSSLRSEDTAVYYCAALNCNVTTCSDGFDMWGQGTTVTVSS

SEQ ID NO: 7331 - protein, 116 aa, synthetic construct
EVQLLESGGGLIQRGGSLRLSCAASGFTVSTNYMSWVRQAPGKGLEWVSVIYSGGTTYYADSVKGRFTISRDNSKNTLYLQMSSLRAEDTAVYYCARVVSDAFDIWGQGTTVTVSS

SEQ ID NO: 7332 - protein, 127 aa, synthetic construct
EVQLLESGPGLVKPSQTLSLTCTVSGGSISSGAYYWTWIRQHPGQGLEWIGYIYYSGITYYNPSLKSRVTISVDTSKNQFSLKLSSVTAADTAVYYCARTYYYDDNGNYYQYYFDYWGQGTLVTVSS

SEQ ID NO: 7333 - protein, 113 aa, synthetic construct
EVQLVESGGGFVQAGQSLRLSCTASGVNLKEYSMGWYRQAPGSARGAVATISSGGAAFYSNAVTGRFTISRDNAKNEVYLQMNGLKDEDTGVYYCSIVSRDIWGRGTQVTVSS

SEQ ID NO: 7334 - protein, 121 aa, synthetic construct
EVQLLESGPGLVKPSQTLSLTCTVSGDSIASGGYYWTWIRQHPGQGLEWIGNIYFTGDTDYHPSLKSRLSISVDTFRNRFSLKLTSVTAADTAVYFCARDGGSGYHNLDYWGQGIKVTVSS

SEQ ID NO: 7335 - protein, 126 aa, synthetic construct
QVQLVQSGAEVKKPGSSVKVSCKASGGTFIRNTISWVRQAPGQGLEWMGRVIPLLNVVDYAQKFQGRVTIIADKSSSTVYMELTTLRSEDTAVYYCAREGTGYCDGGICPDAFDIWGQGTTVTVSS

SEQ ID NO: 7336 - protein, 121 aa, synthetic construct
RSSWCSLGAEVKKPGASVKVSCKASGYTFTTYYIHWVRQAPGEGLEWMGIINPDGGAITYAQKFRGRVTMTTDTSTSTVYMNVISLRSEDTAVYYCARGSLIPAKDGFDIWGRGTTVTVSS

SEQ ID NO: 7337 - protein, 122 aa, synthetic construct
EVQLVQSGAEVKKPGASVKVSCKASGYTFTTYYIHWVRQAPGQGLEWMGIINPDGGARTYAQHFQGRLTMTTDTSTTTVYMELSNLGSEDTAMYYCARDLVAIPAAMCGAYWGQGTLVTVSS

SEQ ID NO: 7338 - protein, 127 aa, synthetic construct
EVQLVESGGGVVQPGRSLRLSCTASGFTFSRYGMHWVRQAPGKGLEWVAGISFDGDDKDYADSLKGRFTISRDNSKDTLYLQMNGLSTEDTAVYFCAKGLGTYCSGGNCYSHYFDYWGQGTLVTVSS

SEQ ID NO: 7339 - protein, 120 aa, synthetic construct
EVQLVESGGGVVQPGRSLRLACTASGVSFSSSGMHWVRQAPGKGLEWVAVISNDGNYKSYSDSVKGRFTISRDPSKNTLYLQMNSLRGEDTAVYYCANDYGDLVTWFDYWGQGALVTVSS

SEQ ID NO: 7340 - protein, 119 aa, synthetic construct
RYQLVQSGAEVKKPGSSVKISCQASGGTFSYNINWVRQAPGQGLEWMGRIIPILGIPHYAQTFQDRVTITADKSTSTLYMELSSLRSEDTAIYYCAREGGSTTAYFPHWGKGTLVTVSS

SEQ ID NO: 7341 - protein, 123 aa, synthetic construct
QVQLVQSGAEVKKPGASVQVSCKASGYTFISQYIHWVRQAPGQGLEWMGIINPDAGSTTYAQQFQGRLTMTTDTSTSTVYMELRSLRSEDTAVYYCTRADDFIPSPFGAFEIWGRGTMVTVSS

SEQ ID NO: 7342 - protein, 129 aa, synthetic construct
EVQLVESGSEVKKPGSSVKVSCKASGGSFSNFAFNWVRQAPGQGLEWMGGIIPLFGAPNYAQKFQGRVTVTADKSTGTAHMELSSLRSEDTAIYYCARGSLYHDSSRGSLDNHYYMEVRGNGTTVTVSS

SEQ ID NO: 7343 - protein, 125 aa, synthetic construct
EVQLVESGGGVVQPGGSLRLSCLGYGVTFDGSAMHWVRQVPGRGLEWVSLISGHGGSTYYAESVKGRFTISRDNSANSLYLQMNSLSTEDTAFYYCVKDAVLVVYGMGNWYFDLWGRGTLVTVSS

SEQ ID NO: 7344 - protein, 121 aa, synthetic construct
QVQLQQWGAGLLKPSENLSLTCGVSGGSFNTFFWTWIRQPAGRGLEWIGDINHSGNTNYNPSLKSRLTISVDTSKNQFSLKLSSVTAADTAVYYCARGRPGWELIPFFDSWGQGTLVTVSS

SEQ ID NO: 7345 - protein, 122 aa, synthetic construct
EVQLVESGAEVKKPGSSVKVSCKASGGSFSTFAISWVRQAPGQGLEWVGRISPSQGISNYAQRFQGRVSITADKSTSTASMELSSLRSEDTAVYFCARDLGAGSYYRHFDSWGQGTLVTVSS

SEQ ID NO: 7346 - protein, 125 aa, synthetic construct
QVQLVQSGVEVKKPGASVMLSCKASGYTFSNYYILWVRQAPGQGLEWMGLINPRGGGTSYAHKFQGRVTMSRDTSTSTAYMELTSLRSEDTAVYYCARDPGVVDPLSPHPLPRFWGQGTLVTVSS

SEQ ID NO: 7347 - protein, 124 aa, synthetic construct
QVQLVQSGAEVKKPGSSVKVSCKASGGPFGSSPISWVRQAPGQGLEWMGRIIPILGVADYAQKFQGRVTITADRSTSTTYMELSSLRSEDTARYYCARDVGYSGSGSSYYFDPWGQGTLVTVSS

SEQ ID NO: 7348 - protein, 124 aa, synthetic construct
EVQLVESGGGLVQPGGSLRLSCVASGFTLSNDDIHWVRQAPGKGLEWVSAIGSAGDTYYADSEKGRFTISREKANNSLYLQMHSLRAGDTAVYYCVRGTMTTLGVFQYYYKEIWGRGTTVTVSS

SEQ ID NO: 7349 - protein, 124 aa, synthetic construct
QVQLQQSGAEVKKPGSSVKVSCKASGGSFNSHSISWVRQAPGQGLEWMGRIIPILGVADYAQKFQGRVNIIADKSTGTAYMELRSLRSEDTAVYYCARDVGYSGSGSAYYFDLWGQGTLVTVSS

SEQ ID NO: 7350 - protein, 121 aa, synthetic construct
EVQLVESGGGVVQPGRSLRLSCAAFGFTFSTYAMHWVRQAPGKGLEWVAVISDDGRYKDSADSVKGRFTISRDNSQNTLYLQMSSLRPEDTAIYYCTREGPMTTVTYFDYWGQGTLVTVSS

SEQ ID NO: 7351 - protein, 128 aa, synthetic construct
EVQLQQSGAGLLKPSETLSLTCGVFGGSFSGNYWSWIRQSPGKGLEWIGEINHSGTTTYNPSLKSRVTISIDTSKNQFSLRLSSVTAADTAVYYCAREVVVIPAATIRYSYNYYMDVWGAGTTVTVSS

SEQ ID NO: 7352 - protein, 122 aa, synthetic construct
EVQLLESGAEVKKPGESLRISCKGSGYSFTTYWITWVRQMPGKGLEWMGRIDPSDSYTKYSPSFQGRVSISADKSTSNAYMQWSSLQASDTAIYYCARGRGSAYDIMEIEYWGQGTLVTAPQ

SEQ ID NO: 7353 - protein, 127 aa, synthetic construct
QVQLVQSGAEVRKPGESLKISCKASGYTFSTYWIGWVRQMPGKGLEWMGIIFPGDSDTRYSPSFQGQVTISADKSISTAYVQWSSLKASDTAMYFCATLKLEGFTPVDYNTLPALYWGQGTLVTVSS

SEQ ID NO: 7354 - protein, 114 aa, synthetic construct
QVQLVESGGDLVQPGGSLRLSCAVSGFTVSNNYMSWVRQPPGKGLEWVSFIYSGGNTFYADSVKGRFTITRDNSKNTLWLQMNSLRAEDTAVYYCATSPAVGVWGQGTMVTVSS

SEQ ID NO: 7355 - protein, 127 aa, synthetic construct
QVTLKESGGGVVQPGRSLRLSCAASGFTFNKYGMHWVRQAPGRGLEWLAVISYDGTNEFYADFVKGRFTISRDNSKNKLYLQMNSLRAEDTAVYYCVKVQGEYCSGTSCYGFTLDVWGQGTTVTVSS

SEQ ID NO: 7356 - protein, 123 aa, synthetic construct
QVQLVESGGGVVQPGRSLRLSCAASGFTFRIYGMHWVRQAPGKGLESVAVISFDGSDRYYADSVKGRFTISRDNSKNTLYLQMNSLRAQDTAVYYCAKGSAVPGSRPYYFDFWGQGTLVTVSS

SEQ ID NO: 7357 - protein, 120 aa, synthetic construct
EVQLVESGPGLVKPSGTLSLTCTVSGGSISSSNWWSWVRQSPGKGLEWIAEIYQSGSTNDNPSLKSRVTISIDKSKNQFSLKLSYVTAADTAVYFCARTPLTDFYYMDVWGKGTTVTVSS

SEQ ID NO: 7358 - protein, 126 aa, synthetic construct
QVQLQESGPGLVKPSGTLSLTCAVSGASISSTNWWSWVRQPPGKGLEWIGEIYHSGSTNYNTSLESRVTMSVDKSQNHFSLKLRSVTAADTAVYYCARGVGFDDFWSGPNRYFSLWGRGTLVTVSS

SEQ ID NO: 7359 - protein, 127 aa, synthetic construct
EVQLLESGAEVRKPGSSVRVSCKASGGAFSIYAISWVRQAPGQGLEWMGEIIPITGTANYAQKFQGRVTITADESTSTAYMELSSLRSEDTAVYYCARVGRSYYDSSGYYYTYFDSWGQGTLVTVSS

SEQ ID NO: 7360 - protein, 123 aa, synthetic construct
EVQLLESGGGVVQPGRSLRLSCAASGFTFINYGMHWVRQAPGKGLEWVAAISYDGSDEYYADSVKGRFTISRDDSKNTVYLQMNSLRTEDTAVYYCAKVTASHYYYYYGMDVWGQGTTVTVSS

SEQ ID NO: 7361 - protein, 124 aa, synthetic construct
EVQLLESGGGVVQPGRSLRLSCAVSGFTFSNYGMHWVRQAPGKGLEWVAFISHDGSTKYYADSVKDRFTISRDTSKNTLYLQMNNLRAEDTAVYYCAKHFGAPTSYYYYGMDVWGQGTTVTVSS

SEQ ID NO: 7362 - protein, 127 aa, synthetic construct
QVQLVQSGGGVVQPGRSLRLSCAASGFTFSTYGMHWVRQAPGKGLEWLALISYDGSNTYSADSVKGRFTISRDNPKNTLFLQMNSLRAEDTAVYYCAKALGPYCGAGDCYWAPLDFWGQGTLVTVSS

SEQ ID NO: 7363 - protein, 131 aa, synthetic construct
QVQLVQSGGGLVQPGRSLRLSCAGSGFTFDDYAMHWVRLVPGKGLEWVSGISWNSGTIGYADSVKGRFIISRDNAENSLYLQMNSLRAEDSALYYCGKDKGPYYYDSGSLWDYYSNGMDVWGQGTTVTVSS

SEQ ID NO: 7364 - protein, 121 aa, synthetic construct
EVQLVESGPGLVKPSQTLSLTCTVSGVSISSGGYYWNWIRQHPGKGLEWIGYIYYSGSTYYNPSLKSRVTMSVDTSKNQYSLKLSSLTAADTAVYYCARDYGGNAQYFNYWGQGTLVTVSS

SEQ ID NO: 7365 - protein, 132 aa, synthetic construct
QVQLEQSGGGLVQPGGSLRLSCAASGFTFSSYAMNWVRQAPGKGLEWVSTISGSGGSTYYADSVKGRFTISRDNSKNTLDLHMSSLRAEDTAVYYCAKANDLGYCSGGRCYPPYYYYGMDVWGQGTTVTVSS

SEQ ID NO: 7366 - protein, 124 aa, synthetic construct
QVQLVQSGAEVKKPGSSVKVSCKASGGTFSSYPISWVRQAPGQGLEWMGRIIPILGIPNYAQKFQGRVTIIADKSTSTAYMELSSLRSEDTAVYYCARDQGYSGSGSHYWFDPWGQGTLVTVSS

SEQ ID NO: 7367 - protein, 122 aa, synthetic construct
EVQLLESGPGLVKPSETLSLTCSVSGASISSYYWSWIRQPPGKGLEWIGYVYYSGSTNYNPSLKSRVTISVDTSKNQFSLKLRSVTAADTAVYYCATDYFDSTGFHYGMDVWGQGTTVTVSS

SEQ ID NO: 7368 - protein, 121 aa, synthetic construct
EVQLLESGAEVKKPGESLRISCKGSEYSFSSYWISWVRQMPGKGLEWMGRIDPSDSYTNYSPSFQGHVTISADKSISTAYLQWSSLKASDTAMYYCARSGGNRLLYGMDVWGQGTTVTVSS

SEQ ID NO: 7369 - protein, 123 aa, synthetic construct
QVQLVQSGAEVKKPGSSVKVSCKPSGSSFTHHPIAWLRQAPGQGLEWVGRIIPILGVASDAEKFQGRLTITADKSTTTTYMELNSLRSEDTAVYFCARVGDMSTTGTDAFDIWGQGTTVTVSS

SEQ ID NO: 7370 - protein, 120 aa, synthetic construct
QVQLQQSGGGLVRPGGSRRLSCAASGFTFSNYDIHWVRQSTGEGLEWVSGIGTSGDTYYAESVKGRFTISREDAMTSVYLQMNRLTAGDTAVYYCARGDASGLFYYMDVWGKGTTVTVSS

SEQ ID NO: 7371 - protein, 116 aa, synthetic construct
EVQLLESGPGLVKPSGTLSLTCAVSGASLSGINWWSWVRQSPGKGLEWIGEIFHTGSVQYNPSLKGRVTISIDKSNSRFSLKLSSVTAADTAVYYCARVAGLFDYWGQGSLVTVSS

SEQ ID NO: 7372 - protein, 118 aa, synthetic construct
QVQLVQSGGGVVQPGGSLRLSCAASGFSINTYGIHWVRQAPGKGLEWVAILWFDGVKKYYAESVEGRFIISRDNFKNTLYLQMNSLRAEDTAVYFCARDGEGGAAENWGQGALVTVSS

SEQ ID NO: 7373 - protein, 124 aa, synthetic construct
QVQLVQSGAEMKKPGSSVKVSCKASGGILNTYSISWVRQAPGQGLEWMGRFIPIIRTATYAHKFQGRVTITADESTSTAYMELNSLTYDDTAVYYCARAADPGVGPTIGYFDPWGQGTLVTVSS

SEQ ID NO: 7374 - protein, 122 aa, synthetic construct
QVQLVQSGAEVKKPGSSVKVSCKASGGTFSNYGINWVRQVPGQGLEWMGRITPMFGMANYVQKFQDRVTFTADKSTGTAYLEVSSLTSEDTAVYYCARSEVMNVGHYYLDSWGQGTLVTVSS

SEQ ID NO: 7375 - protein, 121 aa, synthetic construct
EVQLVETGPGLVKPSQTLSLTCSVSGGSIKSGGYYWSWIRQHPGKGLEWIGYIYFTGSTDYNPSLRGRVTISVDTFENQFSLRLTSVTAADTATYYCARVGGGGTNDFDFWGQGTLVTVSS

SEQ ID NO: 7376 - protein, 132 aa, synthetic construct
EVQLVESGGDLVQPGGSLRLSCAASGFTFRTYDMHWVRQTAVKGLEWVSTIGTSGDRYYSDSVKGRFTISREDAKDSLYLEMNSLRGGDTAVYYCARGNDIALVPPAMSERPRNYFYYLDVWGKGTTVTVSS

SEQ ID NO: 7377 - protein, 120 aa, synthetic construct
EVQLLESGGGVVQPGRSLRLSCAVSGFTFSNYAMHWVRQAPGRGLEWVPVIWSDGTGKHYEDSVRGRFTISRDNFKNMLYLQMNSLRVEDTAVYYCARDYGSRTTWFDPWGQGTLVTVSS

SEQ ID NO: 7378 - protein, 118 aa, synthetic construct
RCTLVQSGGGLVQPGGSLRLSCTASEVIVSRNYMAWIRQAPGRGLEWLSVIYSGGSTFYADSVRGRFTISRHNSKNTLYLQMNSLRPEDTAVYYCARDDARYEAFDIWGQGTTVTVSS

SEQ ID NO: 7379 - protein, 123 aa, synthetic construct
QVQLVQSGAEVKKPGTSVKVSCKSAGGTISRSAITWVRQVPGQGLEWMGRIIPMLGAANYAQKVQGRVTITADKSTNTAYMELSSLRSEDTAVYYCATTNPELSVGGDVFHVWGQGALVTVSS

SEQ ID NO: 7380 - protein, 125 aa, synthetic construct
EVQLVESGAEVKKPGESLKISCTGSGFSFTDYWIGWVRQMPGKGLEWVGIIFPHDSDTRYSPSFQGQVTLSADKSINTAYLHWSSLRASDTAMYYCAKGPQLTAHPLRVGAFDIWGQGTTVTVSS

SEQ ID NO: 7381 - protein, 130 aa, synthetic construct
RCTLKQSGGGVVQPGRSLRLSCAASGFTFSNDDIYWVRQTPGKGLEWVALISYDGSNSYYADSVKGRFTISRDNSNNTVYLQMSSLRGEDTAVYYCARHQESVLPAADRPYRYYYYMDVWGRGTTVTVSS

SEQ ID NO: 7382 - protein, 124 aa, synthetic construct
QVQLQQSGAEVKKPGSSVKVSCKASGGTFSSYSITWVRQAPGQGLEWMGKIIPILNVMDYAQKFQGRVTITADKSTGTAYMDLSSLTSEDTAVYYCARESGYSGSGSVVYFHLWGRGTLVTVSS

SEQ ID NO: 7383 - protein, 120 aa, synthetic construct
QVQLVQSGAEVKKPGSSVKVSCKASGDSFSSYTVNWVRQAPGQGLEWMGKIIAFLGVSNYAQKFQGRVTITADKSTNTAYLVLSSLRSEDTAVYYCAKEGGTTTEYLQHWGQGTLVTVSS

SEQ ID NO: 7384 - protein, 124 aa, synthetic construct
QVQLEQSGAEVKKPGSSVKVSCKASGGPFSSSPISWLRQAPGQGLEWMGRIIPILGVAEYAQKFQGRVTITADRSSSTAYMELSSLRSEDTALYYCARDVGYSGSGSCYYFDPWGQGTLVTVSS

SEQ ID NO: 7385 - protein, 124 aa, synthetic construct
QVQLLESGAEVKKPGSSVKVSCKASGGTFDSYTISWVRQAPGQGLEWMGSIIPSLGITDSEQKFQGRVTITADKSTSTVHMELSSLRSEDTAVYYCARGSGYSGSGSNNYFDPWGQGTLVTVSS

SEQ ID NO: 7386 - protein, 123 aa, synthetic construct
QVQLLESGPGLVKPSETLSLTCSVSGGSISSNYWSWIRQPPGKGLEWIGFVFDSGSTNYNPSLRSRITISIDTSRNQFSLKLRSVTAADTAVYYCARHGPDSSSRYHDAFDIWGQGTTVTVSS

SEQ ID NO: 7387 - protein, 121 aa, synthetic construct
QVQLVESGAEVKKPGASVKISCKASGYTFSNYYVHWVRQAPGHGLEWMGMINPSGGSTTYAQKFQGRVIMTGDTSTKTVYMELSSLRSEDTAVYSCARSQVVPATSHLDYWGQGTLVTVSS

SEQ ID NO: 7388 - protein, 125 aa, synthetic construct
QVQLVQSGAEVKEPGSSVKVSCKASGGTFSSYSITWVRQAPGQGLEWMGTIIPILGVPNYAQKFQGRVTITADKSTSTAYMEVTSLTSEDTAIYYCAREYCSGDSCRTVNWFDPWGQGTLVTVSS

SEQ ID NO: 7389 - protein, 124 aa, synthetic construct
QVQLVESGAEVKKHGSSVKVSCKASAGAFSSYSISWVRQAPGQGLEWMGRVIAFLNIPNYAQKFQGRVTITADKSTSTAYMELTSLRSEDTAVYYCARDSGYSGSGSNNYFDPWGQGNAVTISS

SEQ ID NO: 7390 - protein, 128 aa, synthetic construct
EVQLLESGPGLVKPSETLSLSCTVSGGSTRNYYWTWIRQPPGKGLEWIGYIDYSGSTNYNLSLESRVTISIDTAKNQFSLRLSSVTAADTAVYYCARVGRADAVVPAGIDYYYYMDVWGKGTTVTVSS

SEQ ID NO: 7391 - protein, 123 aa, synthetic construct
EVQLLESGGGVVQPGRSLRLSCAASGFTFGSYGMHWVRQAPGKGLDWVAFIPYDGRNPHYADSVKGRFTVSRDNSKNTLYLQMNSLRAEDTAVYYCATEAGFDPNYNYYLDVWGKGTTVTVSS

SEQ ID NO: 7392 - protein, 116 aa, synthetic construct
EVQLVESGPGLVKPSGTLSLTCAVSGGSISGPNWWSWVRQPPGKGLEWIGEIFHTGNTKYNPSLKSRATISIDKSKNQFSLKLSSVTAADTAIYYCARIMGALDYWGQGTLVTVSS

SEQ ID NO: 7393 - protein, 124 aa, synthetic construct
QVQLVQSGGGLVQPGGSLRLSCAASGFTFSSYDMHWVRQDTGKRLEWVSVIGTYGDTYYPDSVRGRFTISRENGKNSLFLQMNSLRAGDTAVYFCARGTSVTRGSYHYYYMDVWGKGTTVTVSS

SEQ ID NO: 7394 - protein, 116 aa, synthetic construct
QVQLLESGGRVVRPGGSLRLSCAASGFTFDDFAMSWVRQAPGKGLEWVSGINWNGAGAGYADSVKGRFTIFRDNAKNFLYLEMNSLRVEDTALYHCVRSYDTGDVWGSGTTVTVSS

SEQ ID NO: 7395 - protein, 117 aa, synthetic construct
EVQLLESGPGLVKPSETLSLTCTVSGGSISRTTYYWGWIRQSPGKGLEWIGNIFYSGTTYYNPSLKSRLTISLDTSKNQFSLKLTSVTAADTAVYYCTRQIGMADYWGQGTLVTVSS

SEQ ID NO: 7396 - protein, 125 aa, synthetic construct
EVQLVQSGAEVKKPGASVKVSCKASGYSFTNYYIHWVRQAPGQGLEWMGIINAGSGGTSYPQKFQGRVTMTRDTSTSTVDMELSSLRSEDTAVYYCARDPGVVDPLNPHPLPRFWGQGTLVTVSS

SEQ ID NO: 7397 - protein, 122 aa, synthetic construct
EVQLVESGAEVKKPGASVRVSCKASGHTFSTYYIHWVRQAPGQGLEWMGIIHPSGGSTTYAQKFQGRVTMTSDSSTSTVYMDLSSLRSEDTAVYYCARGGLVPDAQEPFDIWGQGTTVTVSS

SEQ ID NO: 7398 - protein, 124 aa, synthetic construct
QVQLVQSGAELKKPGSSVKVSCKASGGSFSSYTISWVRQAPGQGLEWMGRIIPFLGVADLAQKFQGRVTITADKSTNTASMELSSLRSEDTAVYYCARGSGYSSGGSNNYFDSWGQGTLVTVSS

SEQ ID NO: 7399 - protein, 125 aa, synthetic construct
EVQLVQSGAEVKKPGASVKVSCKASGYTFTSFGVNWVRQAPGQGLEWMGWISTFNGNTNFAQKFQGRVTLTTDTSTSTVYMELRSLRSDDTAVYYCAREGPFYCSGGSCYFFDYWGQGTLVTVSS

SEQ ID NO: 7400 - protein, 124 aa, synthetic construct
QVQLVQSGAEVKKPGSSVKVSCMASGGTFSSYTVSWVRQAPGQGLEWMGRIIPILGIANYAQNFQGRVTITADKSTATVYLEVSSLRSEDTAVYYCAREAGYSGSGSSYYFDYWSQGTLVTVSS

SEQ ID NO: 7401 - protein, 124 aa, synthetic construct
QVQLVQSGAEVKKPGSSVKVSCKASGGTFSSNTVSWVRQAPGQGLEWMGRIIPILGIADYAQKFQGRVTITADKSTATVYMEVSSLRSEDTAMYYCAREAGYSGSGSSYYFDYWSQGTLVTVSS

SEQ ID NO: 7402 - protein, 124 aa, synthetic construct
QVQLVQSGAEVKKPGSSVKVSCKASGGTFSSYSISWVRQAPGQGPEWLGKIIPILGATDYAQKFQGRVTIIADKSTSTAYMELSSLRSEDTAVYYCARESGYSGSGSVTYFHLWGRGTLVTVSS

SEQ ID NO: 7403 - protein, 121 aa, synthetic construct
EVQLLESGGGVIQPGRSLRLSCAASGFIFSDYGIHWVRQAPGKGLEWVAVIWYDGSNTYYADSVKGRFTISRDNSKNTVYLQMNSLRAEDTAVYYCARLATVPYFYYMDVWGKGTTVTVSS

SEQ ID NO: 7404 - protein, 124 aa, synthetic construct
EVQLVESGAEVKKPGSSLKVSCKASGGTFSSYTITWVRQAPGQGLEWMGRIIPILGIPNYAQTFEGRVTITADKSTSMAYMELNSLRSEDTAVYYCATEVGYSGYGPSPYFDSWGQGTLVTVSS

SEQ ID NO: 7405 - protein, 119 aa, synthetic construct
EVQLVQSGAEVKKPGESLKISCKGSGYSFISHWIAWVRQMPGKGLEWTGIIYPGDSDIRYSPSFQGQVTFSADKSISTAYLQWSSLKASDTAMYFCARQSSSWHDVDYWGQGTLVTVSS

SEQ ID NO: 7406 - protein, 122 aa, synthetic construct
EVQLVETGGDLIQPGGSLRLSCAASGFNVSRNYMNWVRQAPGKGLEWVSVIYSGGSTFYADSIQGRFTISRDNSKNTLYLQMNSLRAEDTAVYYCARFHDIFTGYSDAFDIWGQGTPVTVSS

SEQ ID NO: 7407 - protein, 125 aa, synthetic construct
EVQLLESGGGVVQPGRSLRLSCAASGFTFSNYAMHWVRQAPGKGLEWVTLISYDGTNKYYADSVKGRFSISRDNSKNTLYLQMNSLRADDTAVYYCARPSGRVLHDPWAYGMDVWGQGTTVTVSS

SEQ ID NO: 7408 - protein, 127 aa, synthetic construct
EVQLLESGPGLVKPSQTLSLTCTVSGGSISSGAYYWSWIRQHPGKGLEWIGYISYSGNIDYNPSLKSRVIISVDTSKNQFSLKLSSVTAADTAVYYCARTYYFDSSGNYYQYYFDYWGQGTLVTVSS

SEQ ID NO: 7409 - protein, 129 aa, synthetic construct
EVQLLESGSEVKKPGSSVKVSCQASGGTFSNSAINWVRQAPGQGLEWMGGIIPLFGTANYAQKFQDRVTITADKSTRTAYMELSSLRSEDTAVYYCARGSLYHDTRWGSFDNHYYMDVWGKGTTVTVSS

SEQ ID NO: 7410 - protein, 116 aa, synthetic construct
EVQLLESGGGLVQPGGSLRLSCAASGFSVRTNYMSWVRQAPGKGLEWVSVIYSDDNTNYADSVKGRFTISRHNSKNTLYLQMNSLRAEDTAVYYCARVVTEAFDIWGQGTTVTVSS

SEQ ID NO: 7411 - protein, 120 aa, synthetic construct
EVQLVQSGGGLVQPGGSLRLSCAASRFTFSSYWMSWVRQAPGKGLEWAATIKQDGSEKLYVESVKGRFTISRDNAKNSLYLQMNSLGAEDTAVYYCARVGPYYYYGMDVWGQGTTVTVSS

SEQ ID NO: 7412 - protein, 126 aa, synthetic construct
EVQLLESGGGLVQPGRSLRLSCAASGFTFDDHAMHWVRQAPGKGLEWVSGISWNSNNIGYGDSVKGRFTISRDNAKNSLFLQMNSLRADDTALYYCAKSHDILDGYLDQINYFDYWGQGTLVTVSS

SEQ ID NO: 7413 - protein, 120 aa, synthetic construct
QVQLVQSGGGVVQPGRSLRLSCAASGFTFSSYAIHWVRQAPGKGLEWVAVIWSDGSHQHYADSVKGRFTISRDNSKNTLYLQMNSLRAEDTAVYYCARDDGSPTTYFGDWGQGTLVTVSS

SEQ ID NO: 7414 - protein, 124 aa, synthetic construct
QVQLEQSGAEVKKPGSSVKVSCKASGGTFSSYTISWVRQAPGQGLEWMGRIIPALGIADYAQNFQDRVTITADKSTSTAYMELSSLRSEDTAVYFCARDVGYSGSGSSYYFDYWGQGTLVTVSS

SEQ ID NO: 7415 - protein, 124 aa, synthetic construct
QVQLEQSGAEVKKPGSSVKVSCKASGGTFSSHSITWVRQAPGQGLEWMGRIIPILDIANYAQKFQGRVTITADKSTSTAYMELSSLRYEDTAVFYCAREIGYSDYGATEWFDPWGQGTLVTVSS

SEQ ID NO: 7416 - protein, 122 aa, synthetic construct
QVQLVQSGAEVKKPGESLKISCKGSGYSFTSYWIAWVRQMPGKGLEWMGLIYPGDSDTRYSPSFQGQVTMSADKSISTAYLQWNSLKASDTAVYYCASSASAYYLFFYMDVWGKGTTVTVSS

SEQ ID NO: 7417 - protein, 120 aa, synthetic construct
EVQLLESGPGLVKPSQTLSLTCTVSGGSISSGGYYWGWIRQHPGKGLEWIGHIYYSGGTNYNPSLKSRVTISEDTSKNQFSLKLSSVTAADTAVYYCARDRDGDFSFDFWGQGTLVTVSS

SEQ ID NO: 7418 - protein, 119 aa, synthetic construct
EVQLLESGGGLVQPGGSLRLSCAASGFTFSSYWMSWVRQAPGKGLEWAASIKLDGSEKYYVVSAKGRYTISRDNAKNSLYLQMNSLRAEDTAVYYCARKRWLQSDFDYWGQGTLVTVSS

SEQ ID NO: 7419 - protein, 126 aa, synthetic construct
EVQLLESGGGLVQPGRSLRLSCAASGFTFDDHAMHWVRQAPGKGLEWVSGISWNSGNIGYGDSVKGRFTISRDNAKNSLFLQMNSLRADDTALYYCAKSHDILNGYLDQINYFDYWGQGTLVTVSS

SEQ ID NO: 7420 - protein, 124 aa, synthetic construct
EVQLVESGGGLVQPGRSLRLSCAASGFIFDDYAMHWVRQAPGKGLEWVSGISWNSASLGYADSVKGRFTISRDNVKNSLSLQMNSLRAEDTALYYCAKDKSSNYGDYAGGLGVWGQGTTVTVSS

SEQ ID NO: 7421 - protein, 118 aa, synthetic construct
EVQLVESGGGLVQPGGSLRLSCAASGFTFSSYWMHWVRQAPGKGLVWVSRIKSDGSSTTYADSVKGRFTFSRDNAKNTLYLQMDSLRAEDTAVYYCASAPSYYYMDVWGKGTTVTVSS

SEQ ID NO: 7422 - protein, 127 aa, synthetic construct
EVQLLESGGGVVQPGRSLRLSCAASGFTFSDYGMHWVRQAPGKGLEWVAVIWYHGSDKYYADSVKGRFTISRDNSKNTLYLQMNSLRAEDTAVYYCARDGGFKPIYPRYYYYYMDVWGKGTTVTVSS

SEQ ID NO: 7423 - protein, 127 aa, synthetic construct
EVQLVQSGGGLVQPGRSLRLSCAASGFTFDDYAMHWVRQAPGKGLEWVSGISGNSGTIGYADSVKGRFTISRDNAKNSLYLQMNRLRAEDTALYFCAKTMAPDRAHYDTANDAFDIWGQGTTVTVSS

SEQ ID NO: 7424 - protein, 129 aa, synthetic construct
QITPKESGLTLVKPTQTLTLTCTFSGFSLSTSGVGVGWIRQPPGKALEWLALIYWNDDKRYSPSLKNRLTITKDTSKNQVVFTMTNMDPVDTATYYCAHRRGDIVVVPAAIIDNWFDPWGQGTLVTVSS

SEQ ID NO: 7425 - protein, 124 aa, synthetic construct
EVQLVESGGGLVQPGRSLRLSCAASGFTFNDYAMHWVRQAPGKGLEWVSGISWNSGSIGYADSVKGRFTISRDNAKNSLYLQMNSLRAEDTAFYYCVKDKSSNYGDYAGGMDVWAQGTTVTVSS

SEQ ID NO: 7426 - protein, 113 aa, synthetic construct
EVQLLESGAEVKKPGESLRISCKGSGYSFFHYWISWVRQMPGKGLEWMATINPVNSYTNYNPSFQGQVTISVDRSINTVYLQWSSLRASDSAMYYCATADRGWGQGTLVTVSS

SEQ ID NO: 7427 - protein, 123 aa, synthetic construct
QVQLVQSGPEVKMPGTSVTVSCKASGFTFAVSSVQWVRQARGQRLEWIGWMVVGSGDTNYAEKFQERVTISGDMSTGTVYMEVSGLKSDDTAVYYCAAPSCSRTTCYDGFNLWGQGTTVTVSS

SEQ ID NO: 7428 - protein, 127 aa, synthetic construct
EVQLLESGGGLVQPGGSMRISCAASGFTFSRYSMHWVRQAPGKGLEWVSGISYYRSDIDYADSVNGRFTISRDSSKNTLYLQMNSLKDEDTAVYYCAKVAGTYCSGTTCSSGYFDYWGQGTAVTVSS

SEQ ID NO: 7429 - protein, 123 aa, synthetic construct
EVQLLESGGAVVQPGGSLRLSCAASGFAFHDYSMHWVRQAPGKGLEWVSLIGPDGGGAFYSDYVKGRFTVSRDNSKNSLFLQLNSMRSEDTAFYYCAKDTSGAKCRVPIFENWGQGTLVTVSS

SEQ ID NO: 7430 - protein, 122 aa, synthetic construct
QVQLVQSGTEVKKPGASVKVSCKASGYTFSDHYMHWVRQAPGQGLEWMGVTNPSAGSTTYAQKFQGRVTMTTDTSTSTVYLGLSNLRPEDTAVYFCARDIFFLPAGDAFDLWGQGTTVTVSS

SEQ ID NO: 7431 - protein, 120 aa, synthetic construct
EVQLVQSETEVKKPGASVKVSCKASGYNFVNYGISWVRQAPGQGLEWMGWINAEYGNRKYAQMVQGRVTMTTDTSTSTAYMELRSIRFDDTAVYYCVRVSSSATGYFDLGGRGTLVTVSS

SEQ ID NO: 7432 - protein, 129 aa, synthetic construct
QVQLQQSGPGLVKPSQTLSLTCTVSGGSISSVYYYWTWIRQHPGKGLEWMGHIYHNGTTYSNPSLKSRVTMSLDTSKNQFSLKVSSVTAADTAVYYCARLGPSFYDRSGSSRLNYFDSWDQGTTVTVSS

SEQ ID NO: 7433 - protein, 124 aa, synthetic construct
EVQLLESGGGLIQPGGSLRLSCVASGFTFSSYDMHWVRQTPSNGLEWVSGIGTTGDTYYLDSVKGRFTISRENAKSSLYLQMNSLRAGDTAVYYCARGDQWELLNRYYYAMDVWGQGTTVTVSS

SEQ ID NO: 7434 - protein, 124 aa, synthetic construct
QVQLQESGGGLVQPGGSLRLSCAASGFTLSSVDMHWVRQVSGKGLEWVSGIGSAGDTYYADSVKGRFTISRENARNSLYLQMSSLRAGDTAVYFCARGDHILTGLNYYYYMDVWGKGTTVTVSS

SEQ ID NO: 7435 - protein, 130 aa, synthetic construct
QAQLLESGPGLVKPSETLSLTCTVSGGSISSDHFYWGWIRQPPGKGLEWIGTTYYTGSTNYNPSLKSRVTISVDTSKNQFSLRLTSVTATDTAVYYCARVEVSGGFSGYDFLTPYYFDYWGQGALVTVSS

SEQ ID NO: 7436 - protein, 121 aa, synthetic construct
QVQLVESGAEVKKPGASVRVSCKASGYTFTSQYVHWVRQAPGQGLEWMGIINPTGSTGYAQKFQGRVTMTSDTSTSTIYMELSGLRSEDTAVYYCARDLVFIPAIDALEIWGQGTTVTVSS

SEQ ID NO: 7437 - protein, 118 aa, synthetic construct
EVQLLESGPGLVKPSETLSLTCSVSGDSISGYYWSWIRQPPGKGLEWIGYIYNSETTDYNPSLKSRVTMSGDTSKNQVSLRLTSVTAADTAVYYCARGMSGGDAFDIWGQGTTVTVSS

SEQ ID NO: 7438 - protein, 126 aa, synthetic construct
EVQLVESGAEVKKPGSSVKVSCKASGDTFTRHSISWVRQAPGQGLEWMGRIIPLPDIPNYAQKFQGRVTITADKSTNTAYMELSTLRSDDTAVYYCARHNSPVWGHYDNSGPFDYWGQGTLVTVSS

SEQ ID NO: 7439 - protein, 122 aa, synthetic construct
EVQLVESGAEVKKPGASVKVSCKASGHTFANYYIHWVRQAPGQGLEWMGIPNPSGGSTAYAHNFQDRVTMTGDTSTSTVYMELSSLRSEDTAVYYCARGGIVPDAKQYFDYWGQGTLVTVSS

SEQ ID NO: 7440 - protein, 127 aa, synthetic construct
EVQLLESGGGLAQPGGSLRLSCAASGFTLSSFSLNWVRQTPGKGLEWVSYITSSGTTIYYADSVKGRFTISRDNAKNLLFLQMNSLRAEDTAVYYCARHLSPTSYDFLSGPDAFDIWGQGTTVTVSS

SEQ ID NO: 7441 - protein, 122 aa, synthetic construct
EVQLLESGAEVKKPGASVKVSCKASGYTFSHYYIHWVRQAPGQGLEWMGIINPSGVGTTYAQKFQGRVTMTSDPSTSTVYMELRSLTSEDTAVYYCARDSVGVPAADALDIWGQGTTVTVSS

SEQ ID NO: 7442 - protein, 118 aa, synthetic construct
EVQLLESGGGLVQPGGSLRLSCAASGFTVSVNYMTWVRQAPGRGPESVSVIYSGGSTFYADSVKGRFTVSRDHPKNTLYLQMNSLRVEDTAVYYCARGDLGTPRIDFWGQGTLVTVSS

SEQ ID NO: 7443 - protein, 116 aa, synthetic construct
EVQLLESGPGLVKPSGTLSLTCAVSGGSISGPNWWSWVRQPPGKGLEWIGEIFHTGNTKYNPSLKSRATISIDKSKNQFSLKLSSVTAADTAIYYCARIMGALDYWGQGTLVTVSS

SEQ ID NO: 7444 - protein, 118 aa, synthetic construct
QVQLVQSGAEVKRPGESLKISCQGSGYSFISNWIGWVRQKPGKGLEWMGIIWPGDSDTTYSPSFQGQVTISVDKSISTAYLQWSSLKASDTAMYYCARRGSAWEIDYWGHGTLVTVSS

SEQ ID NO: 7445 - protein, 122 aa, synthetic construct
QVQLVQSGGGLVQPGGSLRLSCSASGFTFSRYSMDWVRQAPGKGLEYVSGISSDGVTTYYADSMKGRFTISRDNSKSTLYLQMSSLRPEDTAVYYCVKDIGPMTPVTTPESWGQGTLVTVSS

SEQ ID NO: 7446 - protein, 120 aa, synthetic construct
RCPLMESGAAVRKPGASVKVSCKASGYTFTSHDINWVRQATGQGLEWMGWTNPNSGATGYAQKFQGRVTMTRNTSINTAFMELSSLRSDDTAVYYCARMSTTLTNWFDPWGQGTLVTVSS

SEQ ID NO: 7447 - protein, 132 aa, synthetic construct
QVQLVESGGGVVQPGRSLRLSCAASGFTFSDYGMHWVRQAPGKGLEWVALIWYDGYNKRYADSVKGRFTISRDNSKNTLDLQMNSLRGEDTAVYYCARAGLPTDARALDGSGNYYTFYFDSWGQGALVTVSS

SEQ ID NO: 7448 - protein, 128 aa, synthetic construct
EVQLLETGGGLIQPGGSLRLSCAASGFSVSVNYMSWVRQAPGKGLEWVSVIHRGGSTYYPDSVRGRFTISRDNPQNTVYLQMNSLRAEDTAVYYCATSRVYYDSGGYPQYHYYAMDVWGQGTTVTVSS

SEQ ID NO: 7449 - protein, 124 aa, synthetic construct
QVQLVQSGAEVKKPGSSVKVSCKASGGTFSSYSITWVRQAPGHGLEWMGKIIPMLGIADYAQKFQGRATITADKSTSTAYMELSSLRSEDTAVYFCARERGYSDSGSVTYFDLWGRGTLVTVSS

SEQ ID NO: 7450 - protein, 123 aa, synthetic construct
EVQLLESGGGLVKPGGSLRLSCVASGFTFSSYNMNWVRQTPGKGLEWVSSISGTSSFISYADSVKGRFTISRDNAKNSLYLQMNSLRVEDTAVYYCARDSHLLRFLTQPMDVWGQGTTVTVSS

SEQ ID NO: 7451 - protein, 122 aa, synthetic construct
EVQLVESGGGLVQPGRSLRLSCAASGFTFHDYAMHWVRQAPGKGLEWVSGISWNSGNIEYADSVRGRFAISRDNAKNFLYLQMNSMRVEDTALYYCVRDGRGLEPLGWFDPWGQGTLVTVSS

SEQ ID NO: 7452 - protein, 124 aa, synthetic construct
QVQLVQSGAEVKKPGSSVKVSCKASGGTFSSSTISWVRQPPGQGLEWMGRIIPILDLADYAQKFQGRVTITADKSTSTAYMELSSLRSEDTALYYCARDVGYSGSGSSYYFDHWGQGTLVPVSS

SEQ ID NO: 7453 - protein, 120 aa, synthetic construct
EVQLVQSGAEVKKPGESLKISCKTSGYSFISNWIGWVRQMPGKGLEWMGIIWPGDSDTRYSPSFQGQVTISADKSISTAYLQWNSLKASDTAMYYCARSSGTGYNDFDYWGQGTLVTVSS

SEQ ID NO: 7454 - protein, 120 aa, synthetic construct
EVQLVESGGGLAQPGGSLRLSCAASGFTFSRYDMHWVRQTTGKSLEWVSAIGTAGDAYYLDSVKGRFTISRENAKNSLYLQMNSLRAGDTAVYFCARGDLAALDWHFDLWGRGTLVTVSS

SEQ ID NO: 7455 - protein, 120 aa, synthetic construct
QVQLVESGGGMVQPGRSLRLSCAASGFTFSSYAIHWVRQAPGKGLEWVAVIWSDGSHKHYADSVKGRFTISRDNSKNTLYLQMDSLRAEDTAVYYCARDDGLPTTYFDSWGQGTLVTVSS

SEQ ID NO: 7456 - protein, 123 aa, synthetic construct
EVQLVESGPGLVKASETLSLACTVSGYSISSGYSWGWIRQPLGKGLEWIGSIYHSGSTYYKASLKSRVTISLDTSKNQFSLKLSSVTAADTAVYYCARDGQGYVPPRDNFDHWGQGALVTVSS

SEQ ID NO: 7457 - protein, 131 aa, synthetic construct
EVQLLESGPGLVKPSGTLSLTCAVSGGSISTSDWWSWVRQPPGKGLEWIGEIYHTGSTNYNPSLKSRVTISVDTSKNQFSLTLSSVTAADTAMYYCARASEKGLLFGAYTYTYVDWYFDIWGRGTLVTVSS

SEQ ID NO: 7458 - protein, 125 aa, synthetic construct
EVQLLESGGGVVQPGRSLRLSCAASGFNFSNYGMHWVRQAPGKGLEWVAVLTYDGSNKYYAGSVKGRFTISRDNAKNTLYLQMNSLRAEDTAVYYCAKHPCSGGSCYHEFYFDYWGQGTLVTVSS

SEQ ID NO: 7459 - protein, 127 aa, synthetic construct
QVQLVQSGGGVVQPGRSLRLSCAASGFTFSRYGMYWVRQAPGKGLEWVANILYDGSNKYYEDSVKGRFTISRDNSKNTLYLQMNSLRAEDTAVYYCAKASGEYCSGGSCYNHYFDYWGQGTLVTVSS

SEQ ID NO: 7460 - protein, 120 aa, synthetic construct
QVQLVQSGAEVKKPGSSVKVSCKASGGTFSSDSISWVRQAPGQGLEWMGRVFPILGIANYAQKFQGTVTITADKSTSTAYMEMSSLRSEDTAVYYCAREGGTTTEYFRHWGHGTLVTVSS

SEQ ID NO: 7461 - protein, 117 aa, synthetic construct
EVQLVESGGGLIQPGGSLRLSCAASEFIVSSNYMSWVRQAPGKGLEWVSVIYPGGSTFYADSVKGRFTISRDTSKNTLYLQMNSLRAEDTAVYYCARDYGDYYFDYWGQGTLVTVSS

SEQ ID NO: 7462 - protein, 126 aa, synthetic construct
EVQLVESGGGVVQPGRSLRLSCAASGFTFSSYDIHWVRQTPGKGLEWVALISSDGSNKYYADSVKGRFTISRDNSKNTLYLQMNSLRTEDTAVYYCVKGKELRAAAGRTYRPLDYWGQGTLVTVSS

SEQ ID NO: 7463 - protein, 127 aa, synthetic construct
QVQLVQSGGGVVRPGGSLRLSCAASGFTFGDYGMNWVRQVPGKGLEWVSGINWNGGRTGYADPVKGRFTISRDNAKNSLYLQMNSLRAEDTALYYCARGGAIFRYFDLLSSEGMDVWGQGTTVTVSS

SEQ ID NO: 7464 - protein, 126 aa, synthetic construct
QVQLQQSGAEVKKPGSSVKVSCKASGGTFSSYSISWVRQAPGQGLEWMGRIIPLLGIPNYAQKMQGRVTITADKSTSTAYMELSSLRSEDTAVYYCARENCFGTSCSTPWGAFDIWGQGTTVTVSS

SEQ ID NO: 7465 - protein, 129 aa, synthetic construct
QVQLLESGPGLVKPSETLSLTCGVSGYSISSGYYWGWVRQPPGKGLEWIGSIYHSGRTYYNPSLQSRVTISVDTSKNQFSLKLTSVTAADTAVYYCARVGAYCGGGHCYPEDKQSPDYWGQGTLVTVSS

SEQ ID NO: 7466 - protein, 122 aa, synthetic construct
EVQLLESGPGLVKPSETLSLTCTVSGGSISSYYWTWIRQPPGKGLEWIGYTSYSGSTNYNPSLKSRVTISVDTSKNQFSLKLTSVTAADTAVYYCAADYYDSTGYHYGMDVWGQGTTVTVSS

SEQ ID NO: 7467 - protein, 119 aa, synthetic construct
QVQLVQSGAEVKKPGESLKISCKGSGYSFTHYWIGWVRQMPGKGLEWMGIIYPGDSDTRYSPSFQGQVTISADKSISTAYLQWSGLKASDTAMYYCARQGTTVGHFDYWGQGTLVTVSS

SEQ ID NO: 7468 - protein, 124 aa, synthetic construct
EVQLVESGGGLVQPGRSLRLSCAASGFTFDDYAMHWVRQAPGKGLEWVSGISWNSASIGYADSVKGRFTISRDNAKNSLYLQMNSLRAEDTAFYYCAKDLSINWGSPLSGMDVWGQGTTVTVSS

SEQ ID NO: 7469 - protein, 121 aa, synthetic construct
QVQLVQSGGGVVQPGRSLRLSCAASGFTFSSYGMHWVRQAPGKGLEWVAVIWYDGSNKYYADSVKGRFTISRDNSKNTLYLQMNSLRAEDTAVYYCARARGWGVGATIDYWGQGTLVTVSS

SEQ ID NO: 7470 - protein, 122 aa, synthetic construct
RGAAGGVWGRLGTARGSLRLSCAASGFTFSSFPMSGVRQAPGKGLECVSIITTSGGTTYPDSVKGRFTISKDTCKNTLYGQMNSLRAEDTAVYYCDKSEAYGTGWYGKNDYWAQGTLVTVSS

SEQ ID NO: 7471 - protein, 118 aa, synthetic construct
EVQLVESGGGLVQTGGSLRLSCASSGFTFANYYMTWVRQAPGKGLEWVAAVDSDGSRTYYADSVRGRFTISRDNAKSTLYLQMNNLNSEDTAVYYCARTRHYDGLDHWGTGTLVTVSS

SEQ ID NO: 7472 - protein, 124 aa, synthetic construct
LGAAGAVWGRLGPAGGSLRISCAASGFTVSSNYMSWVRQAPGKGVEWVSFIYSGGSTFYRDSVKGRFPISRDKSKNTLYLQMNSLRPEDTAVYYCVREIYGCTSCQHGIPRDHWGQGTLVTVSS

SEQ ID NO: 7473 - protein, 129 aa, synthetic construct
EVQLLESGPGLVKPSQTLSLTCSVSGGSVGSGDFYWNWIRHHPGKGLEWIGYIHYSGSTFYNPSLKNRVTISLDTAKNQLSLKLGSVTAADTAIYYCARAPCSGGGCYYGSLRGAFDYWGQGTLVTVSS

SEQ ID NO: 7474 - protein, 127 aa, synthetic construct
EVQLLESGGGVVQPGRSLRLSCATSGFPFNTHGLNWVRLAPGKGLQWVAVISYDGNYKYYADSVKGRFTIARDNSKNTMYLQMNSLRPDDTAVYYCGRARSTFCTSSSCYSAAFDFGGQGTTVTVSS

SEQ ID NO: 7475 - protein, 123 aa, synthetic construct
EVQLVQSGGGVVQPGRSLRLSCAASGFTFSSYAMHWVRQTPDKGLEWVAVILDDGRGKFYADSVKGRFTISRDNLKNTLYLQMNTVGVEDTAVYYCARDSSTADSLVSWFDPWGQGTLVTVSS

SEQ ID NO: 7476 - protein, 130 aa, synthetic construct
LGAVGESGPGLVKPSQTLSLTCTVSGHSIISGSYYSSWIRQLPGKGLEWIGYMYYSGSTYYNPSLKSRLTISIDTFKNQYSLKLSSVTAADTAVYYCVRESIVVAPAAGTYPSYYGIDVWGQGTTVTVSS

SEQ ID NO: 7477 - protein, 118 aa, synthetic construct
QVQLVQSGAEVKKPGSSVKVSCKASGDTFSNYAITWVRQAPGQGLEWMGRIIPIFGITNIAQKFQGRVTISADKSTGTTYMELSSLRSEDTAVYFCARGRTDDYLDSWGQGTLVTVSS

SEQ ID NO: 7478 - protein, 117 aa, synthetic construct
EVQLVESGGGLVQPGGSLRLSCAASGIIVSRNYMNWVRQTPGKGLEWVSVLYSGGTTFYADSVKGRFTISRDTSKNTLYLQMNSLRLEDTAVYYCARDFHEGAFDIWGQGTTVTVSS

SEQ ID NO: 7479 - protein, 129 aa, synthetic construct
PVQLLESGPGLVKPSETLSLTCTVSGGSIGTSYWSWIRQPPGNGLEWIGNIFKTGRTNYNPSLKSRVTISVDTSKKQFSLRLSSVTAADTAVYFCARAYTHSDFWSGYSDYYDYYMDVWGKGTTVTVSS

SEQ ID NO: 7480 - protein, 118 aa, synthetic construct
EVQLLESGPGLVKPSETLSLTCTVSGDSISGYYWSWLRQPPGKGLEWVGYIYDNGNTNYNPSLKSRVTISLDTSKNQFSLILSAVTAADTAVFYCARGLTTGDAFDLWGQGTTVTVSS

SEQ ID NO: 7481 - protein, 118 aa, synthetic construct
EVQLLESGPGLVKPSETLSLTCTVSGDSISGYYWSWLRQPPGKGLEWVGYIYDNGNTNYNPSLKSRVTISLDTSKNQFSLILSAVTAADTAVFYCARGLTTGDAFDLWGQGTMVTVSS

SEQ ID NO: 7482 - protein, 129 aa, synthetic construct
EVQLLESGGGLVQPGGSLRLSCAASGFTFTNCAMGWVRQAPGKGLEWVSTIGDSGRSTYYADSVKGRFTISRDNSKNTLHLRMNSLRADDTAAYYCAKNLDTPNYDADDYYYYYGMDVWGQGTTVTVSS

SEQ ID NO: 7483 - protein, 119 aa, synthetic construct
QVQLVQSGAEVKEPGESLRISCKGSGYSFTSHWIGWVRQMPGKGLEWMGAVFPGDSDTRYSPSFQGQVTISADKSISTAYLHWSGLKTSDTAMYYCARLGYSYDTGDYWGQGTLVTVSS

SEQ ID NO: 7484 - protein, 122 aa, synthetic construct
EVQLLESGAEVKKPGASVKVSCKTSGYTFTNHYMHWVRQAPGQGLEWMGIINPDGGSRTYAQKFQGRVTMTSDTSTSTVYMELSSVRYEDTAVYYCARDFAFIPAAGPFEYWGQGTLVTVSS

SEQ ID NO: 7485 - protein, 119 aa, synthetic construct
EVQLVESGGGLVQPGGSLRLSCAASGFTFSAYWMTWVRQAPGKGLEWVPNIKQDGSEKYYVDSVKGRFTISRDNAKNALYLQINSLRAEDTAVYTCARVFWLRGGVDFWGQGTLVTVSS

SEQ ID NO: 7486 - protein, 117 aa, synthetic construct
EVQLVETGGGLIQPGESLRLSCAASEIIVSRNYMSWVRQAPGKGLEWVSVIFPGGSTYYADSVKGRFTISRDDSKNTLYLQMNSLRAEDTAVYYCAREDNNNAFDIWGQGTTVTVSS

SEQ ID NO: 7487 - protein, 131 aa, synthetic construct
QVQLLESGGGLVQPGGSLRLSCAASGFTFSNYAMSWVRQSPGKGLEWVSAISGSGDDTYYADSVKGRFTISRDNSKNTLYLQMSLLRAEDTAVYFCAKQSVNRNPGWDFLVSTTEDYFDSWGQGTLVTVSS

SEQ ID NO: 7488 - protein, 127 aa, synthetic construct
EVQLVESGAEVKKPGASVKVSCKASGYTFSSFGVSWVRQAPGQGLEWMGWISTYEGNTNYAQNFQGRVTMTTDTSTSTAYMELRSLRSDDTAVYYCARVFSYYDSSGWGTAYYFDSWGQGTLVTVSS

SEQ ID NO: 7489 - protein, 128 aa, synthetic construct
EVQLLQSGAEVKKPGSSVKVSCKASGGSFSNYGISWVRQAPGQGLEWMGGIIPMFGAAKYAQKFQGRVRIIADESTSTAYMELSSLRSEDTAVYYCARDEATITVVQGVATRHGYDIWGQGTTVTVSS

SEQ ID NO: 7490 - protein, 123 aa, synthetic construct
EVQLLESGGGLVQPGRSLRLSCAASGFTFDDYAMHWVRQAPGKGLEWVSGITWNSGTIGYADSAKGRFTISRDNSKNSLYLHISSLRTEDTALYYCAKDTGSKDYYYYGMDVWGQGTTVTVSS

SEQ ID NO: 7491 - protein, 121 aa, synthetic construct
QVQLVESGAEVKKPGASVKVSCKASGYRFNIYGITWVRQAPGQGLEWMGWSSAYNGNTNYAQKLQGRVTMTTDTSTSTAYMELRSLTSDDTAVYYCARALGEGSGSVFGYWGQGTLVTVSS

SEQ ID NO: 7492 - protein, 124 aa, synthetic construct
EVQLLESGGGLVQPGRSLRLSCAASGFTFDDYAMHWVRQAPGKGLEWVSGISWNGGIINYADSVKGRFIISRDNAKNSLYLQMIRLRAEDTALYYCAKSSSVGDEGEFSSFDYWGQGALVTVSS

SEQ ID NO: 7493 - protein, 122 aa, synthetic construct
QVQLVESGGGLVQPGGSLRLSCAASGFTFSSYAMSWVRQAPGKGLEWVAGVSGSGDGRFYADSVKGRFTISRDNSKNTLYLQMNSLRAEDTAVYYCGKDSNLITQIVVDEYWGQGTLVTVSS

SEQ ID NO: 7494 - protein, 121 aa, synthetic construct
EVQLVESGGGVVQLGRSLRLSCAASGFTFSDYNMHWVRQAPGKGPEWVAVIWYDGSDKYYADSVKGRFTISRDNSKNTLYLQMNSLRAEDTAVYYCAANGYTPGGDFFDPWGHGTLVTVSS

SEQ ID NO: 7495 - protein, 121 aa, synthetic construct
QVQLKQSGPTLVKPTQTLTLTCTFSGFSLSTYGVGVGWIRQPPGKALEWLALIYYDDDKRYSPSLKSRLTITKDTSQNQVVLTMTNMDPVDTATYYCARHTIATIFDFDSWGQGTLVTVSS

SEQ ID NO: 7496 - protein, 128 aa, synthetic construct
EVQLVESGGGLVKPGGSLRLSCAASGFTFSTYTMNWVRQAPGKGLEWVSSISSSNNFIYYADSVKGRFTISRDNAKNSVYLQMNSLRAEDTAVYYCAKDLTYYYDSSDYYGPNAFDIWGQGTTVTVSS

SEQ ID NO: 7497 - protein, 129 aa, synthetic construct
EVQLLESGGGVVQPGTSLRLSCAASGFTFRSYAMHWVRQAPGKGLEWVAAISYDGSNKYFADSVKGRFTISRDHSKNTLYLQMNSLRAADTAVYYCARDPSGTMVRGGIVYYHYGMDVWGQGTTVTVSS

SEQ ID NO: 7498 - protein, 128 aa, synthetic construct
EVQLQQWGAGLLKPSETLSRTCAVYGGSFSGYYWSWIRQSPGKGLEWIGEINHSGSTNYNPSLKSRVTISVDTSKSQFSLKLNSVTDADTAVYYCARGKAIYDFWRGYNGRALNFDNWGQGTLVTVSS

SEQ ID NO: 7499 - protein, 121 aa, synthetic construct
QVQLLESGAEVKKPGSSVKVSCKASGGSFSSDAINWVRQAPGQGLEWMGGINPIFGTANYAQKFRGRVTITADESTSTAYMELSSLRSEDTAVYYCAKDQVTSPLYGMDVWGQGTTVTVSS

SEQ ID NO: 7500 - protein, 118 aa, synthetic construct
EVQLLESGPGLVKPSETLSLTCTVSGDSISSYYWSWIRQPPGKGLEWVGYIYYSGSTDYNPSLKSRVTISVDTSKNQFYLKLSSVTAADTAVYYCARGGGYGDYFDYWGQGTLVTVSS

SEQ ID NO: 7501 - protein, 124 aa, synthetic construct
QVQLVQSGAEVKKPGSSVKVSCKASGGTFSSYAINWVRQAPRQGLEWMGRIIPLLGIANYAQKFQGRVTITADKSTSTAYMEVSSLRSEDTAVYYCARSAPLAGTPPANWFDPWGQGTLVTVSS

SEQ ID NO: 7502 - protein, 115 aa, synthetic construct
EVQLVETGGGLIQPGGSLRLSCAASGLTVSSNYMSWVRQTPGKGLEWVSVIYSGGSTFYADSVKGRFTISRDKSKNTLYLQMNSLRAEDTAVYYCARMPYGMDVWGQGTTVTVSS

SEQ ID NO: 7503 - protein, 120 aa, synthetic construct
EVQLLESGGGLVQPGRSLRLSCAASGFTFDDYALHWVRQAPGKGLEWVSGISWNSVSIDYADSVKGRFTISRDNAKNSLYLQMNSLRAEDTALYYCAKEGCSSTSCYDYWGQGTLVTVSS

SEQ ID NO: 7504 - protein, 124 aa, synthetic construct
QVQLVQSGAEVKKPGESLKISCKGSGYDFSNLWIGWVRLMPGKGPEWMGIISPPDSDTRYNPSFEGQVTISVDNSINTAYLQWNSLKASDTAIYYCARHLGVELGTIRGYFDSWGQGTLVTVSS

SEQ ID NO: 7505 - protein, 120 aa, synthetic construct
QVQLQQWGAGLLKPSETLSLTCAVYDESFRDYFWNWIRQPPGQGLEWMGEVTHTGNINYNPSLKSRVTISVDTSKNQISLNLRSVSAADTAVYYCARGDFYSTRLAFDIWGQGTTVTVSS

SEQ ID NO: 7506 - protein, 120 aa, synthetic construct
QVQLQQSGPGLGLVKPSETLPLTCTVSGDSISGYYWSWIRQPPGKGLEWIGYIYNSETTEYNPSLKSRVTISVDTSKNQISLKLSSVTAADTAVYYCARGAQYGDFFDYWGQGTLVTVSS

SEQ ID NO: 7507 - protein, 124 aa, synthetic construct
EVQLVGVWGRRGPAGRSLRLSCAASGFTFSSYEIHWVRQAPGKGLEWVTLISYDGSNKYYADSVEGRFTISRDNSKNTLYLQMNSLRPEDTAVYYCARAKQWVQRGYYYPMDVWGQGTTVTVSS

SEQ ID NO: 7508 - protein, 128 aa, synthetic construct
EVQLLESGGGVVQPGRSLRLSCAASGFTFSHYGMHWVRQAPGKGLEWVALISYDGTKTSYADSVKGRFTISRDNSKNTLLLEMNSLRGEDTAVYYCAKRVDTYCYADCLGFPTTLDYWGQGTLVTVSS

SEQ ID NO: 7509 - protein, 122 aa, synthetic construct
EVQLVESGAEVKKPGASVKVSCKASGYTFTTYYVHWVRQAPGQGLEWMGIINPDAGSTTYGQQFRGRVTMTSDTSTSTVYMELSSLRSEDTAVYYCARDIFLVPAISAMEVWGQGTTVTVSS

SEQ ID NO: 7510 - protein, 122 aa, synthetic construct
EVQLLESGPGLVKLSETLSLTCKVSGGSFSNYYWSWIRQPPGKRLEWIGYIFYSGSTNYNPSLRSRLTISVDTSKNQFSLNLRSVTAADTAVYYCARDLGYSSGWPDAFDIWGQGTTVTVSS

SEQ ID NO: 7511 - protein, 121 aa, synthetic construct
EVQLVESGGGVVQPGRSLRLSCAASGFTFRRSVMHWVRQAPGKGLEWVADVSSDGSIKTYADSVKGRFTISRDNSKYTLYLQMNSLRAEDTAVYYCARDVDTAMVTILDYWGQGTLVTVSS

SEQ ID NO: 7512 - protein, 121 aa, synthetic construct
EVQLLESGGGVVQPGRSLRLSCAASGFTFGSYVMHWVRQAPGKGLEWVADVSSDGSIKTYADSVKGRFTISRDNSKYTLYLQMNSLRAEDTAVYYCARDVDTAMVTILDYWGQGTLVTVSS

SEQ ID NO: 7513 - protein, 117 aa, synthetic construct
QVQLLESGGGLVQPGGSLRLSCAASGVTVSANYMRWVRQAPGKGLEWVSIIYSGGSTFYADSVKDRFTISRDNSKNTLYLQMNSLRAEDTAVYYCARDLEQFGIDLWGRGTLVTVSS

SEQ ID NO: 7514 - protein, 127 aa, synthetic construct
QVQLVQSGGGVVQPGRSLRLSCAASGFTFRSYGMHWVRQAPGKGLEWVAVILYDGSDKYYADSVKGRFTISRDNSKNTLYLQMNSLKREDTAVYYCAKQMGSHCSAGNCYSATFDYWGQGTLVTVSS

SEQ ID NO: 7515 - protein, 115 aa, synthetic construct
EVQLVESGGGLVQPGGSLRLSCTASGITVSSNYMSWVRQAPGKGLEWVSVVYAGGSTFYADSVKGRFTISRHNSKNTLYLQMNSLRVEDTAVYYCAREAYAFDIWGQGTTVTVSS

SEQ ID NO: 7516 - protein, 122 aa, synthetic construct
EVQLVQSGAEVRKPGASVKVSCKASGYTFTNYYIHWVRQAPGQGLEWMGIINPSAGSTSYAQKFQGRVTMTTDTSTSTVYMELSSLRSEDTAIYYCARDIVQITAAMGLEYWGQGTLVTVSS

SEQ ID NO: 7517 - protein, 121 aa, synthetic construct
EVQLVESGGGVVQPGRSLRVSCAASGFTFSSYAMHWVRQAPGKGLEWVAVISYDGHNKYYADSVKGRFTISRDNSKNTLYLQMDSLRADETAVYYCARGVRWNGDYAVDYWGQGTLVTVSS

SEQ ID NO: 7518 - protein, 120 aa, synthetic construct
EVQLLESGPGLVRPSQTLSLTCTVSGGSISSGDYYWSWIRQHPGKGLEWIGYIFYSGSTYYNPSLKSRVTISVDTSKNQFSLKLNSVTAADTAVYHCARGRQLINWFDPWGQGTLVTVSS

SEQ ID NO: 7519 - protein, 132 aa, synthetic construct
QVQLVESGAEVKKPGASVTVSCKAPAYTFTSYYIHWVRQAPGQGLEWMGIINPSGGSTTYAQKFQGRVTMTRDTSTSTVYMELSSLRSEDTAVYFCARGGRGFLEGVLSDENYYHYYGMDAWGQGTTVTVSS

SEQ ID NO: 7520 - protein, 123 aa, synthetic construct
EVQLLESGSGLVKPSQTLSLTCAVSGGSISSDDYSWNWIRQPPGKGLEWIGYIYHSESTYYNPSLESRVTISVDRSKNQFSLNLSSVTAADTAVYYCAGEVVRGNGRNAFHIWGQGTPVTVSS

SEQ ID NO: 7521 - protein, 126 aa, synthetic construct
EVQLLESGGGVVQPGRSLRLSCAASGFTFSGYAMHWVRQAPGKGLEWVAVISYDGINKYYADSVKGRFTISRDNSMTTLFLQMNSLRAEDTAVYYCARDSHPPVHYFWSGYYCDYWGQGTLVTVSS

SEQ ID NO: 7522 - protein, 122 aa, synthetic construct
QVQLVESGGGLVQPGGSLRLSCAASGFTFSSYAMSWVRQAPGKGLEWVSGVSGSGDGTFYADSVKGRFTISRDNSKNTLYLQMNSLRAEDTAVYYCGKDSNLITMIVVDEYWGQGTLVTVSS

SEQ ID NO: 7523 - protein, 123 aa, synthetic construct
EVQLVESGGGVVQPGRSLRLSCAASGFTFNNFAFHWVRQAPGKGLEWVAVISYDGSNKYYADSVKGRFTISRDNSKNTLYLQMNSLRAEDTAVYYCASAMVAHYYYYYGMDVWGQGTTVTVSS

SEQ ID NO: 7524 - protein, 122 aa, synthetic construct
EVQLLESGPGLVKPSQTLSLTCTVSGGSISSDIYYWSWIRQHPGKGLEWIGYIYYSGSTYYNPSLKSRVTISVDTSKNQFSLKLSSVTAADTAVYYCARNSRFLGTNYFDYWGQGTLVTVSS

SEQ ID NO: 7525 - protein, 127 aa, synthetic construct
EVQLLESGPGLVKPSQTLSLTCTVSGDSISSGGYYWSWIRQHPGKGLEWIGYIYYSGSTYYNPSLKSRVTMSLDTSKNQFSLKLSSVTAADTAVYYCARDWGRGSSSSPEHDAFDIWGQGTTVTVSS

SEQ ID NO: 7526 - protein, 119 aa, synthetic construct
QVQLVQSGGGVVQPGRSLRLSCVASGFTFSSYGMHWVRQAPGKGLEWVALIWYDGSNKYYADSVKGRFTISRDNSKNTLYLQMNSLRAEDTAVYYCARAVPGTNYFDYWGQGTLVTVSS

SEQ ID NO: 7527 - protein, 127 aa, synthetic construct
EVQLLESGPGLVKPSQTLSLTCTVSGGSISSGGYYWSWIRQHPGKGLEWIGYIYYSGSTYYNPSLKSRVTISVDTSKNQFSLKLSSVTAADTAVYYCARTYYYDSSGNYYQYYFDYWGQGTLVTVSS

SEQ ID NO: 7528 - protein, 132 aa, synthetic construct
QVQLVQSGAAVKKPGASVKVSCQASGYTFTNYYIHWVRQAPGQGLEWMGLINPSGGSSNYAQKFQGRVTLTRGTATNTVYMELSSLRSEDMAVYYCARGGRGFLEKILSDEGYYDYFGMDVWGQGTTVTVSS

SEQ ID NO: 7529 - protein, 120 aa, synthetic construct
RSSWWQSGGGLVQPGGPLRLSCAASGFTFSSYALSWVRQAPGKGLECVSALSASGDAPYYADSVKGRFTISRDNSRNTLYLQMNSLRAEDTAVYYCAKQAGSPPDYFDYWGQGTLVTVSS

SEQ ID NO: 7530 - protein, 117 aa, synthetic construct
QVQLVESGGGLIQPGGSLRLSCAASEFIVSSNYMSWVRQAPGKGLEWVSVIYPGGSTFYADSVKGRFTISRDSSKNTLFLQMNSLRAEDTAVYYCARDYGDFYFDFWGQGTLVTVSS

SEQ ID NO: 7531 - protein, 125 aa, synthetic construct
EVQLVESGGGLIQPGGSLRLSCAASGFTFSSFAMSWVRQAPGKGLEWVSAISNSGGSTYYADSVKGRFTISRDNSKNTLYLQMNSLRAEDTALYYCAKQAYSSGWYAAGLVFDYWGQGTLVTVSS

SEQ ID NO: 7532 - protein, 122 aa, synthetic construct
EVQLLESGPGLVKPSETLSLTCTVSGGSISNYYWSWIRQPPGKGLEWIGYIFYGGSTNYNPSLRSRLTISVDTSKNQFSLRLSSVTAADTAVYYCARDLGYSSGWPDAFDIWGQGTTVTVSS

SEQ ID NO: 7533 - protein, 120 aa, synthetic construct
EVQLLESGGGVVQPGRSLRLSCAASGFTFSSYAMHWVRQAPGKGLEWVAVISSDGSMKFYADSVKGRFTISRDNSKNTLFLQMNSLRPEDTAVYYCARDAENLVTEFDYWGQGTLVTVSS

SEQ ID NO: 7534 - protein, 120 aa, synthetic construct
QVQLVQSGAEVKKPGASVKVSCKASGYTFTTYYMHWVRLAPGQGLEWMGIINPSGGGTSYAQKFQGRVTMTRDTSTSTVYMELSSLRSEDTAVYYCVREGCSSTSCFDYWGQGTLVTVSS

SEQ ID NO: 7535 - protein, 130 aa, synthetic construct
EVQLVESGGGVVQPGRSLRLSCAASGFTFSSYGMHWVRQAPGKGLEWVAVIWYDGSNKYYADSVKGRFTISRDNSKNTLYLQMNSLRAEDTAVYYCARDKIIWESGYHKNYYYYYYMDVWGKGTTVTVSS
